(19) United States
(12) Patent Application Publication
(10) Pub. No.: US 2004/0014053 A1
(43) Pub. Date: Jan. 22, 2004

(54) Novel proteins and nucleic acids encoding same

(76) Inventors: Bryan D. Zerhusen, Branford, CT (US); Meera Patturajan, Branford, CT (US); Ramesh Kekuda, Norwalk, CT (US); Charles E. Miller, Guilford, CT (US); Daniel K. Rieger, Branford, CT (US); Carol E.A. Pena, New Haven, CT (US); Richard A. Shimkets, Guilford, CT (US); Li Li, Branford, CT (US); Constance Berghs, New Haven, CT (US); Mei Zhong, Branford, CT (US); Stacie J. Casman, North Haven, CT (US); Edward Z. Voss, Wallingford, CT (US); Ferenc L. Boldog, North Haven, CT (US); Muralidhara Padigaru, Branford, CT (US); Glennda Smithson, Guilford, CT (US); Weizhen Ji, Branford, CT (US); Linda Gorman, Branford, CT (US); Corine A.M. Vernet, Branford, CT (US); Mario W. Leite, Milford, CT (US); Xiaojia Sasha Guo, Branford, CT (US); David W. Anderson, Branford, CT (US); Kimberly A. Spytek, New Haven, CT (US); Valerie Gerlach, Branford, CT (US); Catherine E. Burgess, Wethersfield, CT (US); Nikolai V. Khramtsov, Branford, CT (US); Tatiana Ort, Milford, CT (US); Karen Ellerman, Branford, CT (US); Luca Rastelli, Guilford, CT (US); Michele L. Agee, Wallingford, CT (US); Amitabha Chaudhuri, Madison, CT (US); John S. Chant, Branford, CT (US); Vincent A. DiPippo, East Haven, CT (US); Shlomit R. Edinger, New Haven, CT (US); Andrew J. Eisen, Rockville, MD (US); Esha A. Gangolli, Madison, CT (US); Loic Giot, Madison, CT (US); Chean Eng Ooi, Branford, CT (US); Mark E. Rothenberg, Clinton, CT (US); Steven K. Spaderna, Berlin, CT (US); Tord Hjalt, Lomma (SE); Xiaohong Liu, Lexington, MA (US); Raymond J. Taupier JR., East Haven, CT (US); Elina Catterton, Madison, CT (US); Suresh G. Shenoy, Branford, CT (US)

Correspondence Address: MINTZ, LEVIN, COHN, FERRIS, GLOVSKY, AND POPEO, P.C., ONE FINANCIAL CENTER, BOSTON, MA, 02111, US

(21) Appl. No.: 10/210,130

(22) Filed: Aug. 1, 2002

Related U.S. Application Data
(60) Provisional application No. 60/309,501, filed on Aug. 2, 2001.
(60) Provisional application No. 60/316,508, filed on Aug. 31, 2001.
(60) Provisional application No. 60/354,655, filed on Feb. 5, 2002.
(60) Provisional application No. 60/310,291, filed on Aug. 3, 2001.
(60) Provisional application No. 60/383,887, filed on May 29, 2002.
(60) Provisional application No. 60/310,951, filed on Aug. 8, 2001.
(60) Provisional application No. 60/323,936, filed on Sep. 21, 2001.
(60) Provisional application No. 60/381,039, filed on May 16, 2002.
(60) Provisional application No. 60/311,292, filed on Aug. 9, 2001.
(60) Provisional application No. 60/311,979, filed on Aug. 13, 2001.
(60) Provisional application No. 60/312,203, filed on Aug. 14, 2001.
(60) Provisional application No. 60/361,764, filed on Mar. 5, 2002.
(60) Provisional application No. 60/313,201, filed on Aug. 17, 2001.
(60) Provisional application No. 60/338,078, filed on Dec. 3, 2001.
(60) Provisional application No. 60/380,971, filed on May 15, 2002.
(60) Provisional application No. 60/313,156, filed on Aug. 17, 2001.
(60) Provisional application No. 60/313,702, filed on Aug. 20, 2001.
(60) Provisional application No. 60/380,980, filed on May 15, 2002.
(60) Provisional application No. 60/313,643, filed on Aug. 20, 2001.
(60) Provisional application No. 60/383,761, filed on May 28, 2002.
(60) Provisional application No. 60/322,716, filed on Sep. 17, 2001.
(60) Provisional application No. 60/314,031, filed on Aug. 21, 2001.
(60) Provisional application No. 60/314,466, filed on Aug. 23, 2001.
(60) Provisional application No. 60/315,403, filed on Aug. 28, 2001.
(60) Provisional application No. 60/315,853, filed on Aug. 29, 2001.
(60) Provisional application No. 60/373,825, filed on Apr. 19, 2002.

(51) Int. Cl. C12Q 1/68; G01N 33/574; C07H 21/04; C12N 9/00; C12P 21/02; C12N 5/06; C07K 14/47

(52) U.S. Cl. 435/6; 435/7.23; 435/69.1; 435/183; 435/320.1; 435/325; 530/350; 536/23.2

(57) ABSTRACT

The present invention provides novel isolated polynucleotides and small molecule target polypeptides encoded by the polynucleotides. Antibodies that immunospecifically bind to a novel small molecule target polypeptide or any derivative, variant, mutant or fragment of that polypeptide, polynucleotide or antibody are disclosed, as are methods in which the small molecule target polypeptide, polynucleotide and antibody are utilized in the detection and treatment of a broad range of pathological states. More specifically, the present invention discloses methods of using recombinantly expressed and/or endogenously expressed proteins in various screening procedures for the purpose of identifying therapeutic antibodies and therapeutic small molecules associated with diseases. The invention further discloses therapeutic, diagnostic and research methods for diagnosis, treatment, and prevention of disorders involving any one of these novel human nucleic acids and proteins.

### RELATED APPLICATIONS

[0001] This application claims priority to provisional patent applications U.S. Serial Nos. 60/309,501, filed on Aug. 2, 2001; 60/316,508, filed on Aug. 31, 2001; 60/354,655, filed on Feb. 5, 2002; 60/3 10,291, filed on Aug. 3, 2001; 60/383,887, filed on May 29, 2002; 60/310,951, filed on Aug. 8, 2001; 60/323,936, filed on Sep. 21, 2001; 60/381,039, filed on May 16, 2002; 60/311,292, filed on Aug. 9, 2001; 60/311,979, filed on Aug. 13, 2001; 60/312,203, filed on Aug. 14, 2001; 60/361,764, filed on Mar. 5, 2002; 60/313,201, filed on Aug. 17, 2001; 60/338,078, filed on Dec. 3, 2001; 60/380,971, filed on May 15, 2002; 60/313,156, filed on Aug. 17, 2001; 60/313,702, filed on Aug. 20, 2001; 60/380,980, filed on May 15, 2002; 60/313,643, filed on Aug. 20, 2001; 60/383,761, filed on May 28, 2002; 60/322,716, filed on Sep. 17, 2001; 60/314,031, filed on Aug. 21, 2001, 60/314,466, filed on Aug. 23, 2001; 60/315,403, filed on Aug. 28, 2001; 60/315,853, filed on Aug. 29, 2001, 60/373,825, filed on Apr. 19, 2002; each of which is incorporated herein by reference in its entirety.

### FIELD OF THE INVENTION

[0002] The present invention relates to novel polypeptides that are targets of small molecule drugs and that have properties related to stimulation of biochemical or physiological responses in a cell, a tissue, an organ or an organism. More particularly, the novel polypeptides are gene products of novel genes, or are specified biologically active fragments or derivatives thereof. Methods of use encompass diagnostic and prognostic assay procedures as well as methods of treating diverse pathological conditions.

### BACKGROUND

[0003] Eukaryotic cells are characterized by biochemical and physiological processes which under normal conditions are exquisitely balanced to achieve the preservation and propagation of the cells. When such cells are components of multicellular organisms such as vertebrates, or more particularly organisms such as mammals, the regulation of the biochemical and physiological processes involves intricate signaling pathways. Frequently, such signaling pathways involve extracellular signaling proteins, cellular receptors that bind the signaling proteins and signal transducing components located within the cells.

[0004] Signaling proteins may be classified as endocrine effectors, paracrine effectors or autocrine effectors. Endocrine effectors are signaling molecules secreted by a (given organ into the circulatory system, which are then transported to a distant target organ or tissue. The target cells include the receptors for the endocrine effector, and when the endocrine effector binds, a signaling cascade is induced. Paracrine effectors involve secreting cells and receptor cells in close proximity to each other, for example two different classes of cells in the same tissue or organ. One class of cells secretes the paracrine effector, which then reaches the second class of cells, for example by diffusion through the extracellular fluid. The second class of cells contains the receptors for the paracrine effector; binding of the effector results in induction of the signaling cascade that elicits the corresponding biochemical or physiological effect. Autocrine effectors are highly analogous to paracrine effectors, except that the same cell type that secretes the autocrine effector also contains the receptor. Thus the autocrine effector binds to receptors on the same cell, or on identical neighboring cells. The binding, process then elicits the characteristic biochemical or physiological effect.

[0005] Signaling processes may elicit a variety of effects on cells and tissues including by way of nonlimiting example induction of cell or tissue proliferation, suppression of growth or proliferation, induction of differentiation or maturation of a cell or tissue, and suppression of differentiation or maturation of a cell or tissue.

[0006] Many pathological conditions involve dysregulation of expression of important effector proteins. In certain classes of pathologies the dysregulation is manifested as diminished or suppressed level of synthesis and secretion of protein effectors. In other classes of pathologies the dysregulation is manifested as increased or up-regulated level of synthesis and secretion of protein effectors. In a clinical setting a subject may be suspected of suffering from a condition brought on by altered or mis-regulated levels of a protein effector of interest. Therefore there is a need to assay for the level of the protein effector of interest in a biological sample from such a subject, and to compare the level with that characteristic of a nonpathological condition. There also is a need to provide the protein effector as a product of manufacture. Administration of the effector to a subject in need thereof is useful in treatment of the pathological condition. Accordingly, there is a need for a method of treatment of a pathological condition brought on by a diminished or suppressed levels of the protein effector of interest. In addition, there is a need for a method of treatment of a pathological condition brought on by a increased or up-regulated levels of the protein effector of interest.

[0007] Small molecule targets have been implicated in various disease states or pathologies. These targets may be proteins, and particularly enzymatic proteins, which are acted upon by small molecule drugs for the purpose of altering target function and achieving a desired result. Cellular, animal and clinical studies can be performed to elucidate the genetic contribution to the etiology and pathogeniesis of conditions in which small molecule targets are implicated in a variety of physiologic, pharmicologic or native states. These studies utilize the core technologies at CuraGen Corporation to look at differential gene expression, protein-protein interactions, large-scale sequencing of expressed genes and the association of genetic variations such as, but not limited to, single nucleotide polymorphisms (SNPs) or splice variants in and between biological samples from experimental and control groups. The goal of such studies is to identify potential avenues for therapeutic intervention in order to prevent, treat the consequences or cure the conditions.

[0008] In order to treat diseases, pathologies and other abnormal states or conditions in which a mammalian organism has been diagnosed as being, or as being at risk for becoming, other than in a normal state or condition, it is important to identify new therapeutic agents. Such a procedure includes at least the steps of identifying a target component within an affected tissue or organ, and identifying a candidate therapeutic agent that modulates the functional attributes of the target. The target component may be any biological macromolecule implicated in the disease or pathology. Commonly the target is a polypeptide or protein with specific functional attributes. Other classes of macromolecule may be a nucleic acid, a polysaccharide, a lipid such as a complex lipid or a glycolipid; in addition a target may be a sub-cellular structure or extra-cellular structure that is comprised of more than one of these classes of macromolecule. Once such a target has been identified, it may be employed in a screening assay in order to identify favorable candidate therapeutic agents from among a large population of substances or compounds.

[0009] In many cases the objective of such screening assays is to identify small molecule candidates; this is commonly approached by the use of combinatorial methodologies to develop the population of substances to be tested. The implementation of high throughput screening methodologies is advantageous when working with large, combinatorial libraries of compounds.

### SUMMARY OF THE INVENTION

[0010] The invention includes nucleic acid sequences and the novel polypeptides they encode. The novel nucleic acids and polypeptides are referred to herein as NOVX, or NOV1, NOV2. NOV3, etc., nucleic acids and polypeptides. These nucleic acids and polypeptides, as well as derivatives, homologs, analogs and fragments thereof, will hereinafter be collectively designated as “NOVX” nucleic acid, which represents the nucleotide sequence selected from the group consisting of SEQ ID NO: 2n−1, wherein n is an integer,between 1 and 88, or polypeptide sequences, which represents the group consisting of SEQ ID NO: 2n, wherein n is an integer between 1 and 88.

[0011] In one aspect, the invention provides an isolated polypeptide comprising a mature form of a NOVX amino acid. One example is a variant of a mature form of a NOVX amino acid sequence wherein any amino acid in the mature form is changed to a different amino acid, provided that no more than 15% of tlhe amino acid residues in the sequence of the mature form are so changed. The amino acid can be, for example, a NOVX amino acid sequence or a variant of a NOVX amino acid sequence, wherein any amino acid specified in the chosen sequence is changed to a different amino acid, provided that no more than 15% of the amino acid residues in the sequence are so changed. The invention also includes fragments of any of these. In another aspect, the invention also includes an isolated nucleic acid that encodes a NOVX polypeptide, or a fragment, homolog, analog or derivative thereof.

[0012] Also included in the invention is a NOVX polypeptide that is a naturally occurring allelic variant of a NOVX sequence. In one embodiment, the allelic variant includes an amino acid sequence that is the translation of a nucleic acid sequence differing by a single nucleotide from a NOVX nucleic acid sequence. In another embodiment, the NOVX polypeptide is a variant polypeptide described therein, wherein any amino acid specified in the chosen sequence is changed to provide a conservative substitution. In one embodiment, the invention discloses a method for determining the presence or amount of the NOVX polypeptide in a sample. The method involves the steps of: providing a sample; introducing the sample to an antibody that binds immunospecifically to the polypeptide; and determining the presence or amount of antibody bound to the NOVX polypeptide, thereby determining the presence or amount of the NOVX polypeptide in the sample. In another embodiment, the invention provides a method for determining the presence of or predisposition to a disease associated with altered levels of a NOVX polypeptide in a mammalian subject. This method involves the steps of: measuring the level of expression of the polypeptide in a sample from the first mammalian subject; and comparing the amount of the polypeptide in the sample of the first step to the amount of the polypeptide present in a control sample from a second mammalian subject known not to have, or not to be predisposed to, the disease, wherein an alteration in the expression level of the polypeptide in the first subject as compared to the control sample indicates the presence of or predisposition to the disease.

[0013] In a further embodiment, the invention includes a method of identifying an agent that binds to a NOVX polypeptide. This method involves the steps of: introducing the polypeptide to the agent; and determining whether the agent binds to the polypeptide. In various embodiments, the agent is a cellular receptor or a downstream effector.

[0014] In another aspect, the invention provides a method for identifying a potential therapeutic agent for use in treatment of a pathology, wherein the pathology is related to aberrant expression or aberrant physiological interactions of a NOVX polypeptide. The method involves the steps of: providing a cell expressing the NOVX polypeptide and having a property or function ascribable to the polypeptide; contacting the cell with a composition comprising a candidate substance: and determining whether the substance alters the property or function ascribable to the polypeptide; whereby, if an alteration observed in the presence of the substance is not observed when the cell is contacted with a composition devoid of the substance, the substance is identified as a potential therapeutic agent. In another aspect, the invention describes a method for screening for a modulator of activity or of latency or predisposition to a pathology associated with the NOVX polypeptide. This method involves the following steps: administering a test compound to a test animal at increased risk for a pathology associated with the NOVX polypeptide, wherein the test animal recombinantly expresses the NOVX polypeptide. This method involves the steps of measuring the activity of the NOVX polypeptide in the test animal after administering the compound of step; and comparing the activity of the protein in the test animal with the activity of the NOVX polypeptide in a control animal not administered the polypeptide, wherein a change in the activity of the NOVX polypeptide in the test animal relative to the control animal indicates the test compound is a modulator of latency of, or predisposition to, a pathology associated with the NOVX polypeptide. In one embodiment, the test animal is a recombinant test animal that expresses a test protein transgene or expresses the transgene under the control of a promoter at an increased level relative to a wild-type test animal, and wherein the promoter is not the native gene promoter of the transgene. In another aspect, the invention includes a method for modulating the activity of the NOVX polypeptide, the method comprising introducing a cell sample expressing the NOVX polypeptide with a compound that binds to the polypeptide in an amount sufficient to modulate the activity of the polypeptide.

[0015] The invention also includes an isolated nucleic acid that encodes a NOVX polypeptide, or a fragment, homolog, analog or derivative thereof. In a preferred embodiment, the nucleic acid molecule comprises the nucleotide sequence of a naturally occurring allelic nucleic acid variant. In another embodiment, the nucleic acid encodes a variant polypeptide, wherein the variant polypeptide has the polypeptide sequence of a naturally occurring polypeptide variant. In another embodiment, the nucleic acid molecule differs by a single nucleotide from a NOVX nucleic acid sequence. In one embodiment, the NOVX nucleic acid molecule hybridizes under stringent conditions to the nucleotide sequence selected from the group consisting of SEQ ID NO: 2n−1, wherein n is an integer between 1 and 88, or a complement of the nucleotide sequence. In another aspect, the invention provides a vector or a cell expressing a NOVX nucleotide sequence.

[0016] In one embodiment, the invention discloses a method for modulating the activity of a NOVX polypeptide. The method includes the steps of: introducing a cell sample expressing the NOVX polypeptide with a Compound that binds to the polypeptide in an amount sufficient to modulate the activity of the polypeptide. In another embodiment, the invention includes an isolated NOVX nucleic acid molecule comprising a nucleic acid sequence encoding a polypeptide comprising a NOVX amino acid sequence or a variant of a mature form of the NOVX amino acid sequence, wherein any amino acid in the mature form of the chosen sequence is changed to a different amino acid, provided that no more than 15% of the amino acid residues in the sequence of the mature form are so changed. In another embodiment, the invention includes an amino acid sequence that is a variant of the NOVX amino acid sequence, in which any amino acid specified in the chosen sequence is changed to a different amino acid, provided that no more than 15% of the amino acid residues in the sequence are so changed.

[0017] In one embodiment, the invention discloses a NOVX nucleic acid fragment encoding at least a portion of a NOVX polypeptide or any variant of the polypeptide, wherein any amino acid of the chosen sequence is changed to a different amino acid, provided that no more than 10% of the amino acid residues in the sequence are so changed. In another embodiment, the invention includes the complement of any of the NOVX nucleic acid molecules or a naturally occurring allelic nucleic acid variant. In another embodiment, the invention discloses a NOVX nucleic acid molecule that encodes a variant polypeptide, wherein the variant polypeptide has the polypeptide sequence of a naturally occurring polypeptide variant. In another embodiment, the invention discloses a NOVX nucleic acid, wherein the nucleic acid molecule differs by a single nucleotide from a NOVX nucleic acid sequence.

[0018] In another aspect, the invention includes a NOVX nucleic acid, wherein one or more nucleotides in the NOVX nucleotide sequence is changed to a different nucleotide provided that no more than 15% of the nucleotides are so changed. In one embodiment, the invention discloses a nucleic acid fragment of the NOVX nucleotide sequence and a nucleic acid fragment wherein one or more nucleotides in the NOVX nucleotide sequence is changed from that selected from the group consisting of the chosen sequence to a different nucleotide provided that no more than 15% of the nucleotides are so changed. In another embodiment, the invention includes a nucleic acid molecule wherein the nucleic acid molecule hybridizes under stringent conditions to a NOVX nucleotide sequence or a complement of the NOVX nucleotide sequence. In one embodiment, the invention includes a nucleic acid molecule, wherein the sequence is changed such that no more than 15% of the nucleotides in the coding sequence differ from the NOVX nucleotide sequence or a fragment thereof.

[0019] In a further aspect, the invention includes a method for determining the presence or amount of the NOVX nucleic acid in a sample. The method involves the steps of: providing the sample; introducing the sample to a probe that binds to the nucleic acid molecule; and determining the presence or amount of the probe bound to the NOVX nucleic acid molecule, thereby determining the presence or amount of the NOVX nucleic acid molecule in the sample. In one embodiment, the presence or amount of the nucleic acid molecule is used as a marker for cell or tissue type.

[0020] In another aspect, the invention discloses a method for determining the presence of or predisposition to a disease associated with altered levels of the NOVX nucleic acid molecule of in a first mammalian subject. The method involves the steps of: measuring the amount of NOVX nucleic acid in a sample from the first mammalian subject; and comparing the amount of the nucleic acid in the sample of step (a) to the amount of NOVX nucleic acid present in a control sample from a second mammalian subject known not to have or not be predisposed to, the disease; wherein an alteration in the level of the nucleic acid in the first subject as compared to the control sample indicates the presence of or predisposition to the disease.

[0021] Unless otherwise defined, all technical and scientific terms used herein have the same meaning as commonly understood by one of ordinary skill in the art to which this invention belongs. Although methods and materials similar or equivalent to those described herein can be used in the practice or testing of the present invention, suitable methods and materials are described below. All publications, patent applications, patents, and other references mentioned herein are incorporated by reference in their entirety. In the case of conflict, the present specification, including definitions, will control. In addition, the materials, methods, and examples are illustrative only and not intended to be limiting.

[0022] Other features and advantages of the invention will be apparent from the following detailed description and claims.

### DETAILED DESCRIPTION OF THE INVENTION

[0023] The present invention provides novel nucleotides and polypeptides encoded thereby. Included in the invention are the novel nucleic acid sequences, their encoded polypeptides, antibodies, and other related compounds. The sequences are collectively referred to herein as “NOVX nucleic acids” or “NOVX polynucleotides” and the corresponding encoded polypeptides are referred to as “NOVX polypeptides” or “NOVX proteins.” Unless indicated otherwise, “NOVX” is meant to refer to any of the novel sequences disclosed herein. Table A provides a summary of the NOVX nucleic acids and their encoded polypeptides.

TABLE A
Sequences and Corresponding SEQ ID Numbers

| | | SEQ | SEQ ID | |
|---|---|---|---|---|
| | | ID NO | NO | |
| NOVX | Internal | (nucleic | (amino | |
| Assignment | Identification | acid) | acid) | Homology |
| 1a | CG102071-03 | 1 | 2 | MAP Kinase Phosphatase-like protein |
| 2a | CG102734-01 | 3 | 4 | Rab4-like protein |
| 2b | CG102734-02 | 5 | 6 | RAS-Related protein RAB-like protein |
| 2c | 209829447 | 7 | 8 | Rab4-like protein |
| 3a | CG112785-01 | 9 | 10 | GPCR-like protein |
| 4a | CG116818-02 | 11 | 12 | pyruvate carboxylase isoform-like protein |
| 5a | CG117653-02 | 13 | 14 | ATP binding cassette ABCG1-like protein |
| 6a | CG119674-02 | 15 | 16 | Orphan Neurotransmitter Transporter NTT5-like |
| | | | | protein |
| 6b | CG119674-03 | 17 | 18 | Orphan Neurotransmitter Transporter NTT5-like |
| | | | | protein |
| 7a | CG120123-02 | 19 | 20 | Amino acid transporter ATA2-like protein |
| 8a | CC120814-01 | 21 | 22 | Glutathione S-transferase-like protein |
| 9a | CG122768-01 | 23 | 24 | Peroxiredoxin 2 like protein-like protein |
| 10a | CG122786-01 | 25 | 26 | Prostaglandin F Synthase-like protein |
| 11a | CG122795-01 | 27 | 28 | Serine/Threonine Protein Phosphatase-like protein |
| 12a | CG122805-01 | 29 | 30 | Ubiquinol-cytochrome C reductase hinge protein |
| | | | | like-protein |
| 13a | CG123100-01 | 31 | 32 | Mitogen activated kinase-like protein |
| 14a | CG124136-01 | 33 | 34 | Striated muscle-specific Serine/Threonine Protein |
| | | | | kinase-like protein |
| 14b | CG124136-02 | 35 | 36 | Striated Muscle-Specific Serine/Threonine Protein |
| | | | | Kinase-like protein |
| 14c | CG124136-03 | 37 | 38 | Striated muscle-specific Serine/Threonine Protein |
| | | | | kinase-like protein |
| 14d | 283022671 | 39 | 40 | Striated muscle-specific Serine/Threonine Protein |
| | | | | kinase-like protein |
| 15a | CG124553-01 | 41 | 42 | Polypeptide N-acetylgalactosaminyltransferase- |
| | | | | like protein |
| 15b | 276644723 | 43 | 44 | Polypeptide N-acetylgalactosaminyltransferase- |
| | | | | like protein |
| 15c | 276644750 | 45 | 46 | Polypeptide N-acetylgalactosaminyltransferase- |
| | | | | like protein |
| 16a | CG124691-01 | 47 | 48 | Polypeptide N-Acetylgalactosaminyltransferase- |
| | | | | like protein |
| 16b | CG124691-01 | 49 | 50 | Polypeptide N-Acetylgalactosaminyltransferase- |
| | | | | like protein (taqman panel) |
| 16c | CG124691-01 | 51 | 52 | UDP-GalNAc Transferase-like protein |
| 17a | CG125169-01 | 53 | 54 | Alcohol Dehydrogenase Class III CHI Chain-like |
| | | | | protein |
| 18a | CG125197-01 | 55 | 56 | Lysophospholipase (Acyl-Protein Thioesterase-1)- |
| | | | | like protein |
| 19a | CG125215-01 | 57 | 58 | AMP-binding enzyme-like protein |
| 19b | CG-125215-02 | 59 | 60 | AMP-binding enzyme-like Protein |
| 20a | CG125332-02 | 61 | 62 | natriuretic peptide-converting enzyme-like protein |
| 21a | CG125363-01 | 63 | 64 | Mitogen-activated protein kinase-like protein |
| 22a | CG126012-01 | 65 | 66 | Zinc transporter-like protein |
| 23a | CG126481-01 | 67 | 68 | Phosphodiesterase Hydrolase-like protein |
| 23b | CG126481-02 | 69 | 70 | Phosphodiesterase Hydrolase-like protein |
| 23c | 278459554 | 71 | 72 | Phosphodiesterase Hydrolase-like protein |
| 23d | 278463211 | 73 | 74 | Phosphodiesterase Hydrolase-like protein |
| 23e | 278465805 | 75 | 76 | Phosphodiesterase Hydrolase-like protein |
| 24a | CG127851-01 | 77 | 78 | Aldose 1-epimerase-like protein |
| 24b | CG127851-02 | 79 | 80 | Aldose 1-epimerase-like protein |
| 25a | CG127906-01 | 81 | 82 | Protease-like protein |
| 26a | CG128021-01 | 83 | 84 | Ubiquitin carboxyl-terminal hydrolase 11-like |
| | | | | protein |
| 27a | CG128291-01 | 85 | 86 | Matrix metalloproteinase 19-like protein |
| 28a | CG128380-01 | 87 | 88 | Calpain family cysteine protease-like protein |
| 29a | CG128439-02 | 89 | 90 | Endothelial Lipase-like protein |
| 29b | 171826603 | 91 | 92 | Endothelial Lipase-like protein |
| 30a | CG128489-01 | 93 | 94 | Thyroid peroxidase precursor-like protein |
| 31a | CG128825-01 | 95 | 96 | Tyrosine-protein kinase receptor FLT3-like |
| | | | | protein |
| 31b | CG128825-02 | 97 | 98 | Splice Variant of Tyrosine-protein kinase receptor |
| | | | | FLT3-like Proteins |
| 32a | CG128891-01 | 99 | 100 | Myotonic dystrophy kinase-related Cdc42-binding |
| | | | | kinase (MRCK)-like protein |
| 32b | CG128891-02 | 101 | 102 | Myotonic dystrophy kinase-related Cdc42-related |
| | | | | Kinase-like protein |
| 32c | 276585662 | 103 | 104 | IFC-Myotonic dystrophy kinase-related Cdc42- |
| | | | | related kinase-like protein |
| 33a | CG131490-01 | 105 | 106 | HEXOKINASE 1-like protein |
| 33b | CG131490-02 | 107 | 108 | hexokinase 1-like protein splice variant |
| 34a | CG131881-01 | 109 | 110 | Biphenyl-hydrolase Related Protein-like protein |
| 34b | CG131881-03 | 111 | 112 | Biphenyl-hydrolase Related Protein like protein |
| 34c | CG131881-04 | 113 | 114 | Biphenyl-hydrolase Related Protein-like protein |
| 34d | CG131881-05 | 115 | 116 | Biphenyl-hydrolase Related Protein-like protein |
| 35a | CG133535-01 | 117 | 118 | Tubulin-Tyrosine Ligase-like protein |
| 36a | CG133558-01 | 119 | 120 | Dipeptidyl Aminopeptidase Protein 6 (KIAA1492)- |
| | | | | like protein |
| 37a | CG133589-01 | 121 | 122 | ADAM-like protein |
| 37b | CG133589-02 | 123 | 124 | ADAM-like protein |
| 38a | CG133668-01 | 125 | 126 | Ras-related protein-like protein |
| 38b | CG133668-02 | 127 | 128 | Ras-related protein-like protein |
| 39a | CG133750-01 | 129 | 130 | Mixed lineage kinase MLK1-like protein |
| 40a | CG133819-01 | 131 | 132 | phosplipid-transporting ATPase VB-like |
| | | | | protein |
| 41a | CG134375-01 | 133 | 134 | peptidylprolyl isomerase A (Cyclophilin A)-like |
| | | | | protein |
| 42a | CG135546-01 | 135 | 136 | Adenylate kinase-like protein |
| 43a | CG136321-01 | 137 | 138 | Phosphatidylinositol-specific phospholipase-like |
| | | | | protein |
| 44a | CG136648-01 | 139 | 140 | Divalent cation transporter-like protein |
| 45a | CG54479-01 | 141 | 142 | Hepatocyte growth factor-like protein precursor |
| | | | | (MSP-like protein) |
| 45b | CG4479-02 | 143 | 144 | Hepatocyte growth factor-like protein precursor |
| | | | | (MSP-like protein) |
| 45c | CG54479-03 | 145 | 146 | Hepatocyte growth factor-like protein precursor |
| | | | | (MSP-like protein) |
| 45d | CG54479-04 | 147 | 148 | Hepatocyte growth factor-like protein precursor |
| | | | | (MSP-like protein) |
| 45e | CG54479-05 | 149 | 150 | Hepatocyte growth factor-like protein precursor |
| | | | | (MSP-like protein) |
| 45f | CG54479-06 | 151 | 152 | Hepatocyte growth factor-like protein precursor |
| | | | | (MSP-like protein) |
| 46a | CG56649-01 | 153 | 154 | Human membrane-type serine protease 6 (MTSP- |
| | | | | 6)-like protein |
| 46b | 169427553 | 155 | 156 | Human membrane-type serine protease 6 (MTSP- |
| | | | | 6)-like protein |
| 47a | CG57209-01 | 157 | 158 | Human EMR1 hormone receptor-like protein |
| 47b | CG57209-04 | 159 | 160 | Human EMR1 hormone receptor-like protein |
| 47c | 165275217 | 161 | 162 | Human EMR1 hormone receptor-like protein |
| 48a | CG59325-01 | 163 | 164 | Human endometrial cancer related protein, AXL- |
| | | | | like protein |
| 48b | CG59325-03 | 165 | 166 | Human endometrial cancer related protein, AXL- |
| | | | | like protein |
| 48c | CG59325-04 | 167 | 168 | AXL-receptor tyrosine Kinase-like protein |
| 48d | 172557413 | 169 | 170 | Human axl receptor-like protein |
| 48e | 172557493 | 171 | 172 | Human axl receptor-like protein |
| 48f | 172557606 | 173 | 174 | Human axl receptor-like protein |
| 49a | CG59582-03 | 175 | 176 | Red Cell Acid Phosphatase 1-like protein |

[0024] Table A indicates the homology of NOVX polypeptides to known protein families. Thus, the nucleic acids and polypeptides, antibodies and related compounds according to the invention corresponding to a NOVX as identified in column 1 of Table A will be useful in therapeutic and diagnostic applications implicated in, for example, pathologies and disorders associated with the known protein families identified in column 5 of Table A.

[0025] Pathologies, diseases, disorders and condition and the like that are associated with NOVX sequences include, but are not limited to: e.g., cardiomyopathy, atherosclerosis, hypertension, congenital heart defects, aortic stenosis, atrial septal defect (ASD), atrioventricular (A-V) canal defect, ductus arteriosus, pulmonary steniosis, subaortic stenosis, ventricular septal defect (VSD), valve diseases, tuberous sclerosis, scleroderma, obesity, metabolic disturbances associated with obesity, transplantation, adrenoleukodystrophy, congenital adrenal hyperplasia, prostate cancer, diabetes, metabolic disorders. neoplasm; adenocarcinoma, lymphoma, uterus cancer, fertility, hemophilia, hypercoagulation, idiopathic thorombocytopenic purpura, immunodeficienicies, graft versus host disease, AIDS, bronchial asthma, Crohn's disease: multiple sclerosis, treatment of Albright Hereditary Ostoedystrophy, infectious disease, anorexia, cancer-associated cachexia, cancer, neurodegenerative disorders, Alzheimer's Disease, Parkinson's Disorder, immune disorders, hematopoietic disorders, and the various dyslipidemias,] of the metabolic syndrome X and wasting disorders associated with chronic diseases and various cancers, as shell as conditions such as transplantation and fertility.]

[0026] NOVX nucleic acids and their encoded polypeptides are useful in a variety of applications and contexts. The various NOVX nucleic acids and polypeptides according to the invention are useful as novel members of the protein families according to the presence of domains and sequence relatedness to previously described proteins. Additionally, NOVX nucleic acids and polypeptides can also be used to identify proteins that are members of the family to which the NOVX polypeptides belong.

[0027] Consistent with other known members of the family of proteins, identified in column 5 of Table A, the NOVX polypeptides of the present invention show homology to, and contain domains that are characteristic of, other members of such protein families. Details of the sequence relatedness and domain analysis for each NOVX are presented in Example A.

[0028] The NOVX nucleic acids and polypeptides can also be used to screen for molecules, which inhibit or enhance NOVX activity or function. Specifically, the nucleic acids and polypeptides according to the invention may be used as targets for the identification of small molecules that modulate or inhibit diseases associated with the protein families listed in Table A.

[0029] The NOVX nucleic acids and polypeptides are also useful for detecting specific cell types. Details of the expression analysis for each NOVX are presented in Example C. Accordingly, the NOVX nucleic acids, polypeptides, antibodies and related compounds according to the invention will have diagnostic and therapeutic applications in the detection of a variety of diseases with differential expression in normal vs. diseased tissues, e.g. detection of a variety of cancers.

[0030] Additional utilities for NOVX nucleic acids and polypeptides according to the invention are disclosed herein.

[0031] NOVX Clones

[0032] NOVX nucleic acids and their encoded polypeptides are useful in a variety of applications and contexts. The various NOVX nucleic acids and polypeptides according to the invention are useful as novel members of the protein families according to the presence of domains and sequence relatedness to previously described proteins. Additionally, NOVX nucleic acids and polypeptides can also be used to identity proteins that are members of the family to which the NOVX polypeptides belong.

[0033] The NOVX genes and their corresponding encoded proteins are useful for preventing, treating or ameliorating medical conditions, e.g., by protein or gene therapy. Pathological conditions can be diagnosed by determining the amount of the new protein in a sample or by determining the presence of mutations in the new genes. Specific uses are described for each of the NOVX genes, based on the tissues in which they are most highly expressed. Uses include developing products for the diagnosis or treatment of a variety of diseases and disorders.

[0034] The NOVX nucleic acids and proteins of the invention are useful in potential diagnostic and therapeutic applications and as a research tool. These include serving as a specific or selective nucleic acid or protein diagnostic and/or prognostic marker, wherein the presence or amount of the nucleic acid or the protein are to be assessed, as well as potential therapeutic applications such as the following: (i) a protein therapeutic, (ii) a small molecule drug target, (iii) an antibody target (therapeutic, diagnostic, drug targeting/cytotoxic antibody), (iv) a nucleic acid useful in gene therapy (gene delivery/gene ablation), and (v) a composition promoting tissue regeneration in vitro and in vivo (vi) a biological defense weapon.

[0035] In one specific embodiment, the invention includes an isolated polypeptide comprising an amino acid sequence selected from the group consisting of: (a) a mature form of the amino acid sequence selected from the group consisting of SEQ ID NO: 2n, wherein n is an integer between 1 and 88; (b) a variant of a mature form of the amino acid sequence selected from the group consisting of SEQ ID NO: 2n, wherein n is an integer between 1 and 88, wherein any amino acid in the mature form is changed to a different amino acid, provided that no more than 15% of the amino acid residues in the sequence of the mature form are so changed; (c) an amino acid sequence selected from the group consisting of SEQ ID NO: 2n, wherein n is an integer between 1 and 88; (d) a variant of the amino acid sequence selected from the group consisting of SEQ ID NO: 2n, wherein n is an integer between 1 and 88 wherein any amino acid specified in the chosen sequence is changed to a different amino acid, provided that no more than 15% of the amino acid residues in the sequence are so changed; and (e) a fragment of any of (a) through (d).

[0036] In another specific embodiment, the invention includes an isolated nucleic acid molecule comprising a nucleic acid sequence encoding a polypeptide comprising an amino acid sequence selected from the group consisting of: (a) a mature form of the amino acid sequence given SEQ ID NO: 2n, wherein n is an integer between 1 and 88; (b) a variant of a mature form of the amino acid sequence selected from the group consisting of SEQ ID NO: 2n, wherein n is an integer between 1 and 88 wherein any amino acid in the mature form of the chosen sequence is changed to a different amino acid, provided that no more than 15% of the amino acid residues in the sequence of the mature form are so changed; (c) the amino acid sequence selected from the group consisting of SEQ ID NO: 2n, wherein n is an integer between 1 and 88; (d) a variant of the amino acid sequence selected from the group consisting of SEQ ID NO: 2n, wherein n is an integer between 1 and 88, in which any amino acid specified in the chosen sequence is changed to a different amino acid, provided that no more than 15% of the amino acid residues in the sequence are so changed; (e) a nucleic acid fragment encoding at least a portion of a polypeptide comprising the amino acid sequence selected from the group consisting of SEQ ID NO: 2n, wherein n is an integer between 1 and 88 or any variant of said polypeptide wherein any amino acid of the chosen sequence is changed to a different amino acid, provided that no more than 10% of the amino acid residues in the sequence are so changed; and (f) the complement of any of said nucleic acid molecules.

[0037] In yet another specific embodiment, the invention includes an isolated nucleic acid molecule, wherein said nucleic acid molecule comprises a nucleotide sequence selected from the group consisting of: (a) the nucleotide sequence selected from the group consisting of SEQ ID NO: 2n−1, wherein n is an integer between 1 and 88; (b) a nucleotide sequence wherein one or more nucleotides in the nucleotide sequence selected from the group consisting of SEQ ID NO: 2n−1, wherein n is an integer between 1 and 88 is changed from that selected from the group consisting of the chosen sequence to a different nucleotide provided that no more than 15% of the nucleotides are so changed; (c) a nucleic acid fragment of the sequence selected from the group consisting of SEQ ID NO: 2n−1, wherein n is an integer between 1 and 88; and (d) a nucleic acid fragment wherein one or more nucleotides in the nucleotide sequence selected from the group consisting of SEQ ID NO: 2n−1, wherein n is an integer between 1 and 88 is changed from that selected from the group consisting of the chosen sequence to a different nucleotide provided that no more than 15% of the nucleotides are so changed.

[0038] NOVX Nucleic Acids and Polypeptides

[0039] One aspect of the invention pertains to isolated nucleic acid molecules that encode NOVX polypeptides or biologically active portions thereof. Also included in the invention are nucleic acid fragments sufficient for use as hybridization probes to identify NOVX-encoding nucleic acids (e g A NOVX mRNAs) and fragments for use as PCR primers for the amplification and/or mutation of NOVX nucleic acid molecules. As used herein, the term “nucleic acid molecule” is intended to include DNA molecules (e.g., cDNA or genomic DNA), RNA molecules (e.g., mRNA), analogs of the DNA or RNA generated using nucleotide analogs, and derivatives, fragments and homologs thereof The nucleic acid molecule may be single-stranded or double-stranded, but preferably is comprised double-stranded DNA.

[0040] A NOVX nucleic acid can encode a mature NOVX polypeptide. As used herein, a “mature” form of a polypeptide or protein disclosed in the present invention is the product of a naturally occurring polypeptide or precursor form or proprotein. The naturally occurring polypeptide, precursor or proprotein includes, by way of nonlimiting example, the full-length gene product encoded by the corresponding gene. Alternatively, it may be defined as the polypeptide, precursor or proprotein encoded by an ORF described herein. The product “mature” form arises, by way of nonlimiting example, as a result of one or more naturally occurring processing steps that may take place within the cell (e g., host cell) in which the gene product arises. Examples of such processing steps leading to a “mature” form of a polypeptide or protein include the cleavage of the N-terminal methionine residue encoded by the initiation codon of an ORF, or the proteolytic cleavage of a signal peptide or leader sequence. Thus a mature form arising from a precursor polypeptide or protein that has residues 1 to N, where residue 1 is the N-terminal methionine, would have residues 2 through N remaining after removal of the N-terminal methionine. Alternatively, a mature form arising from a precursor polypeptide or protein having residues 1 to N, in which an N-terminal signal sequence from residue 1 to residue M is cleaved, would have the residues from residue M+1 to residue N remaining. Further as used herein, a “mature” form of a polypeptide or protein may arise from a step of post-translational modification other than a proteolytic cleavage event. Such additional processes include, by way of non-limiting example, glycosylation, myristylation or phosphorylation. In general, a mature polypeptide or protein may result from the operation of only one of these processes, or a combination of any of them.

[0041] The term “probe”, as utilized herein, refers to nucleic acid sequences of variable length, preferably between at least about 10 nucleotides (nt), about 100 nt, or as many as approximately, e.g., 6,000 nt, depending upon the specific use. Probes are used in the detection of identical, similar, or complementary nucleic acid sequences. Longer length probes are generally obtained from a natural or recombinant source, are highly specific, and much slower to hybridize than shorter-length oligomer probes. Probes may be single-stranded or double-stranded and designed to have specificity in PCR, membrane-based hybridization technologies, or ELISA-like technologies.

[0042] The term “isolated” nucleic acid molecule, as used herein, is a nucleic acid that is separated from other nucleic acid molecules which are present in the natural source of the nucleic acid. Preferably, an “isolated” nucleic acid is free of sequences which naturally flank the nucleic acid (i.e., sequences located at the 5′- and 3′-termini of the nucleic acid) in the genomic DNA of the organism from which the nucleic acid is derived. For example, in various embodiments, the isolated NOVX nucleic acid molecules can contain less than about 5 kb, 4 kb, 3 kb, 2 kb, 1 kb, 0.5 kb or 0.1 kb of nucleotide sequences which naturally flank the nucleic acid molecule in genomic DNA of the cell/tissue from which the nucleic acid is derived (e.g., brain, heart, liver, spleen, etc.). Moreover, an “isolated” nucleic acid molecule, such as a cDNA molecule, can be substantially free of other cellular material, or culture medium, or of chemical precursors or other chemicals.

[0043] A nucleic acid molecule of the invention, e.g., a nucleic acid molecule having the nucleotide sequence of SEQ ID NO: 2n−1, wherein n is an integer between 1 and 88, or a complement of this nucleotide sequence, can be isolated using standard molecular biology techniques and the sequence information provided herein. Using all or a portion of the nucleic acid sequence of SEQ ID NO: 2n−1, wherein n is an integer between 1 and 88, as a hybridization probe, NOVX molecules can be isolated using standard hybridization and cloning techniques (e.g., as described in Sambrook, et. al., (eds.), MOLECULAR CLONING: A LABORATORY MANUAL 2^{nd} Ed., Cold Spring Harbor Laboratory Press, Cold Spring Harbor, N.Y., 1989; and Ausubel, et al., (eds.), CURRENT PROTOCOLS IN MOLECULAR BIOLOGY, John Wiley & Sons, New York, N.Y. 1993.)

[0044] A nucleic acid of the invention can be amplified using cDNA, mRNA or alternatively, genomic DNA, as a template with appropriate oligonucleotide primers according to standard PCR amplification techniques. The nucleic acid so amplified can be cloned into an appropriate vector and characterized by DNA sequence analysis. Furthermore, oligonucleotides corresponding to NOVX nucleotide sequences can be prepared by standard synthetic techniques, e.g., using an automated DNA synthesizer.

[0045] As used herein, the term oligonucleotide refers to a series of linked nucleotide residues. A short oligonucleotide sequence may be based on, or designed from, a genomic or cDNA sequence and is used to amplify, confirm, or reveal the presence of an identical, similar or complementary DNA or RNA in a particular cell or tissue. Oligonucleotides comprise a nucleic acid sequence having( about 10 nt. 50 nt, or 100 nt in length, preferably about 15 nt to 30 nt in length. In one embodiment of the invention, an oligonucleotide comprising a nucleic acid molecule less than 100 nt in length would further comprise at least 6 contiguous nucleotides of SEQ ID NO: 2n−1, wherein n is an integer between 1 and 88, or a complement thereof. Oligonucleotides may be chemically synthesized and may also be used as probes.

[0046] In another embodiment, an isolated nucleic acid molecule of the invention comprises a nucleic acid molecule that is a complement of the nucleotide sequence shown in SEQ ID NO: 2n−1, wherein n is an integer between 1 and 88, or a portion of this nucleotide sequence (e.g., a fragment that can be used as a probe or primer or a fragment encoding a biologically-active portion of a NOVX polypeptide). A nucleic acid molecule that is complementary to the nucleotide sequence of SEQ ID NO: 2n−1, wherein n is an integer between 1 and 88, is one that is sufficiently complementary to the nucleotide sequence of SEQ ID NO: 2n−1, wherein n is an integer between 1 and 88. that it can hydrogen bond with few or no mismatches to the nucleotide sequence shown in SEQ ID NO: 2n−1, wherein i? is an integer between 1 and 88, thereby forming a stable duplex.

[0047] As used herein, the term “complementary” refers to Watson−Crick or Hoogsteen base pairing between nucleotides units of a nucleic acid molecule, and the term “binding” means the physical or chemical interaction between two polypeptides or compounds or associated polypeptides or compounds or combinations thereof. Binding includes ionic, non−ionic, van der Waals, hydrophobic interactions, and the like. A physical interaction can be either direct or indirect. Indirect interactions may be through, or due to the effects of another polypeptide or compound. Direct binding refers to interactions that do not take place through, or due to, the effect of another polypeptide or Compound, but instead are without other substantial chemical intermediates.

[0048] “fragment” provided herein is defined as a sequence of at least 6 (contiguous) nucleic acids or at least 4 (contiguous) amino acids, a length sufficient to allow for specific hybridization in the case of nucleic acids or for specific recognition of an epitope in the case of amino acids, and is at most some portion less than a full length sequence. Fragments may be derived from any contiguous portion of a nucleic acid or amino acid sequence of choice.

[0049] A full-length NOVX clone is identified as containing an ATG translation start codon and an in-frame stop codon. Any disclosed NOVX nucleotide sequence lacking an ATG start codon therefore encodes a truncated C-terminal fragment of the respective NOVX polypeptide, and requires that the corresponding full-length cDNA extend in the 5′ direction of the disclosed sequence. Any disclosed NOVX nucleotide sequence lacking an in-frame stop codon similarly encodes a truncated N-terminal fragment of the respective NOVX polypeptide, and requires that the corresponding full-length cDNA extend in the 3′ direction of the disclosed sequence.

[0050] A “derivative” is a nucleic acid sequence or amino acid sequence formed from the native compounds either directly, by modification or partial substitution. An “analog” is a nucleic acid sequence or amino acid sequence that has a structure similar to, but not identical to, the native compound, e.g. they differs from it in respect to certain components or side chains. Analogs may be synthetic or derived from a different evolutionary origin and may have a similar or opposite metabolic activity compared to wild type. A “homolog” is a nucleic acid sequence or amino acid sequence of a particular gene that is derived from different species.

[0051] Derivatives and analogs may be full length or other than full length. Derivatives or analogs of the nucleic acids or proteins of the invention include, but are not limited to, molecules comprising regions that are substantially homologous to the nucleic acids or proteins of the invention, in various embodiments, by at least about 70%, 80%, or 95% identity (with a preferred identity of 80-95%) over a nucleic acid or amino acid sequence of identical size or when compared to an aligned sequence in which the alignment is done by a computer homology program known in the art, or whose encoding nucleic acid is capable of hybridizing to the complement of a sequence encoding the proteins under stringent, moderately stringent, or low stringent conditions. See e.g. Ausubel, et al., CURRENT PROTOCOLS IN MOLECULAR BIOLOGY, John Wiley & Sons, New York, N.Y., 1993, and below.

[0052] A “homologous nucleic acid sequence” or “homologous amino acid sequence,” or variations thereof, refer to sequences characterized by a homology at the nucleotide level or amino acid level as discussed above. Homologous nucleotide sequences include those sequences coding for isoforms of NOVX polypeptides. Isoforms can be expressed in different tissues of the same organism as a result of, for example, alternative splicing of RNA. Alternatively, isoforms can be encoded by different genes. In the invention, homologous nucleotide sequences include nucleotide sequences encoding for a NOVX polypeptide of species other than humans, including, but not limited to: vertebrates, and thus can include, e.g., frog, mouse, rat, rabbit, dog, cat, cow, horse, and other organisms. Homologous nucleotide sequences also include, but are not limited to, naturally occurring allelic variations and mutations of the nucleotide sequences set forth herein. A homologous nucleotide sequence does not, however, include the exact nucleotide sequence encoding human NOVX protein, homologous nucleic acid sequences include those nucleic acid sequences that encode conservative amino acid substitutions (see below) in SEQ ID NO: 2n−1, wherein n is an integer between 1 and 88, as well as a polypeptide possessing NOVX biological activity. Various biological activities of the NOVX proteins are described below.

[0053] A NOVX polypeptide is encoded by the open reading frame (“ORF”) of a NOVX nucleic acid. An ORF corresponds to a nucleotide sequence that could potentially be translated into a polypeptide. A stretch of nucleic acids comprising an ORF is uninterrupted by a stop codon. An ORF that represents the coding sequence for a full protein begins with an ATG “start” codon and terminates with one of tile three “stop” codons, namely, TAA, TAG, or TGA. For the purposes of this invention, an ORF may be any part of a coding sequence, with or without a start codon, a stop codon, or both. For an ORF to be considered as a good candidate for coding for a bona fide cellular protein, a minimum size requirement is often set, e g., a stretch of DNA that would encode a protein of 50 amino acids or more.

[0054] The nucleotide sequences determined from the cloning of the human NOVX genes allows for the generation of probes and primers designed for use in identifying and/or cloning NOVX homologous in other cell types, e.g. from other tissues, as well as NOVX homologous from other vertebrates. The probe/primer typically comprises substantially purified oligonucleotide. The oligonucleotide typically comprises a region of nucleotide sequence that hybridizes under stringent conditions to at least about 12, 25, 50, 100, 150, 200, 250, 300, 350 or 400 consecutive sense strand nucleotide sequence of SEQ ID NO: 2n−1, wherein n is an integer between 1 and 88; or an anti-sense strand nucleotide sequence of SEQ ID NO: 2,n−1, wherein n is an integer between 1 and 88; or of a naturally occurring mutant of SEQ ID NO: 2n−1, wherein n is an integer between 1 and 88.

[0055] Probes based on the human NOVX nucleotide sequences can be used to detect transcripts or genomic sequences encoding the same or homologous proteins. In various 1 5 embodiments, the probe has a detectable label attached. e.g., the label can be a radioisotope, a fluorescent compound, an enzyme, or an enzyme co-factor. Such probes can be used as a part of a diagnostic test kit for identifying cells or tissues which mis-express a NOVX protein, such as by measuring a level of a NOVX-encoding nucleic acid in a sample of cells from a subject e.g., detecting NOVX mRNA levels or determining whether a genomic NOVX gene has been mutated or deleted.

[0056] “A polypeptide having a biologically-active portion of a NOVX polypeptide” refers to polypeptides exhibiting activity similar, but not necessarily identical to, an activity of a polypeptide of the invention, including mature forms, as measured in a particular biological assay, with or without dose dependency. A nucleic acid fragment encoding a “biologically-active portion of NOVX” can be prepared by isolating a portion of SEQ ID NO: 2,n−1, wherein n is an integer between 1 and 88, that encodes a polypeptide having a NOVX biological activity (the biological activities of the NOVX proteins are described below), expressing the encoded portion of NOVX protein (e.g., by recombinant expression in vitro) and assessing the activity of the encoded portion of NOVX.

[0057] NOVX Nucleic Acid and Polypeptide Variants

[0058] The invention further encompasses nucleic acid molecules that differ from the nucleotide sequences of SEQ ID NO: 2n−1, wherein n is an integer between 1 and 88, due to degeneracy of the genetic code and thus encode the same NOVX proteins as that encoded by the nucleotide sequences of SEQ ID NO: 2n−l, wherein n is an integer between 1 and 88. In another embodiment, an isolated nucleic acid molecule of the invention has a nucleotide sequence encoding a protein having an amino acid sequence of SEQ ID NO: 2n, wherein n is an integer between 1 and 88.

[0059] In addition to the human NOVX nucleotide sequences of SEQ ID NO: 2n−1 wherein n is an integer between 1 and 88, it will be appreciated by those skilled in the art that DNA sequence polymorphisms that lead to changes in the amino acid sequences of the NOVX polypeptides may exist within a population (e.g., the human population). Such genetic polymorphism in the NOVX genes may exist among individuals within a population due to natural allelic variation. As used herein, the terms “genie” and “recombinant gene” refer to nucleic acid molecules comprising an open reading frame (ORF) encoding a NOVX protein, preferably a vertebrate NOVX protein. Such natural allelic variations can typically result in 1-5% variance in the nucleotide sequence of the NOVX genes. Any and all such nucleotide variations and resulting amino acid polymorphisms in the NOVX polypeptides, which are the result of natural allelic variation and that do not alter the functional activity of the NOVX polypeptides, are intended to be within the scope of the invention.

[0060] Moreover, nucleic acid molecules encoding NOVX proteins from other species, and thus that have a nucleotide sequence that differs from a human SEQ ID NO: 2n−1, wherein n is an integer between 1 and 88. are intended to be within the scope of the invention. Nucleic acid molecules corresponding to natural allelic variants and homologous of the NOVX cDNAs of the invention call be isolated based on their homology to the human NOVX nucleic acids disclosed herein using the human cDNAs, or a portion thereof, as a hybridization probe according to standard hybridization techniques under stringent hybridization conditions.

[0061] Accordingly, in another embodiment, an isolated nucleic acid molecule of the invention is at least 6 nucleotides in length and hybridizes under stringent conditions to the nucleic acid molecule comprising the nucleotide sequence of SEQ ID NO: 2n−1 , wherein n is an integer between 1 and 88. In another embodiment, the nucleic acid is at least 10, 25, 50, 100, 250, 500, 750, 1000, 1500, or 2000 or more nucleotides in length. In yet another 30 embodiment, an isolated nucleic acid molecule of the invention hybridizes to the coding region. As used herein, the term “hybridizes under stringent conditions” is intended to describe conditions for hybridization and washing under which nucleotide sequences at least about 65% homologous to each other typically remain hybridized to each other.

[0062] Homologs (i.e., nucleic acids encoding NOVX proteins derived from species other than human) or other related sequences (e g., paralogs) can be obtained by low, moderate or high stringency hybridization with all or a portion of the particular human sequence as a probe using methods well known in the art for nucleic acid hybridization and cloning.

[0063] As used herein, the phrase “stringent hybridization conditions” refers to conditions under which a probe, primer or oligonucleotide will hybridize to its target sequence, but to no other sequences. Stringent conditions are sequence-dependent and will be different in different circumstances. Longer sequences hybridize specifically at higher temperatures than shorter sequences. Generally, stringent conditions are selected to be about 5° C. lower than the thermal melting point (Tm) for the specific sequence at a defined ionic strength and pH. The Tm is the temperature (under defined ionic strength, pH and nucleic acid concentration) at which 50% of the probes complementary to the target sequence hybridize to the target sequence at equilibrium. Since the target sequences are generally present at excess, at Tm, 50% of the probes arc occupied at equilibrium. Typically, stringent conditions will be those in which the salt concentration is less than about 1.0 M sodium ion, typically about 0.01 to 1.0 M sodium ion (or other salts) at pH 7.0 to 8.3 and the temperature is at least about 30° C. for short probes, primers or oligonucleotides (e.g., 10 nt to 50 nt) and at least about 60° C. for longer probes, primers and oligonucleotides. Stringent conditions may also be achieved with the addition of destabilizing agents, such as formamide.

[0064] Stringent conditions are known to those skilled in the art and can be found in Ausubel. et. al., (eds.), CURRENT PROTOCOLS IN MOLECULAR BIOLOGY, John Wiley & Sons, N.Y. (1989), 6.3.1-6.3.6. Preferably, the conditions arc such that sequences at least about 65%. 70%, 75%, 85%, 90%, 95%, 98%. or 99% homologous to each other typically remain hybridized to each other. A non-limiting example of stringent hybridization conditions are hybridization in a high salt buffer comiiprising 6×SSC, 50 miiM Tris-HCl (pH 7.5), 1 mM EDTA, 0.02% PVP, 0.02% Ficoll, 0.02% BSA, and 500 mg/mil denatured salmon sperm DNA at 65° C., followed by one or more washes in 0.2×SSC, 0.01% BSA at 50° C. An isolated nucleic acid molecule of the invention that hybridizes under stringent conditions to a sequence of SEQ ID NO: 2n−1, wherein n is an integer between 1 and 88, corresponds to a naturally-occurring nucleic acid molecule. As used herein, a “naturally-occurring” nucleic acid molecule refers to an RNA or DNA molecule having a nucleotide sequence that occurs in nature (e.g., encodes a natural protein).

[0065] In a second embodiment, a nucleic acid sequence that is hybridizable to the nucleic acid molecule comprising the nucleotide sequence of SEQ ID NO: 2n−1, wherein n is an integer between 1 and 88, or fragments, analogs or derivatives thereof, under conditions of moderate stringency is provided. A non-limiting example of moderate stringency hybridization conditions are hybridization in 6×SSC, 5× Reinhardt's solution, 0.5% SDS and 100 mg/ml denatured salmon sperm DNA at 55 ° C., followed by one or more washes in 5×SSC, 0.1% SDS at 37° C. Other conditions of moderate stringency that may be used are well-known within the art. See, e g., Ausubel, et al. (eds.), 1993, CURRENT PROTOCOLS IN MOLECULAR BIOLOGY, John Wiley & Sons, NY, and Krieger, 1990; GENE TRANSFER AND EXPRESSION, A LABORATORY MANUAL, Stockton Press, NY.

[0066] In a third embodiment, a nucleic acid that is hybridizable to the nucleic acid molecule comprising the nucleotide sequences of SEQ ID NO: 2n−1, wherein n is an integer between 1 and 88. or fragments, analogs or derivatives thereof, under conditions of low stringency, is provided. A non-limiting example of low stringency hybridization conditions are hybridization in 35% formiamide, 5×SSC, 50 mM Tris-HCl (pH 7.5), 5 mM EDTA, 0.02% PVP, 0.02% Ficoll, 0.2% BSA, 100 mg/ml denatured salmon sperm DNA, 10% (wt/vol) dextrani sulfate at 40° C. followed by one or more washes in 2×SSC, 25 mM Tris-HCl (pH 7.4), 5 mM EDTA, and 0.1% SDS at 50° C. Other conditions of low stringcncy that may be used are well known in the art e.g., as employed for cross-species hybridizations). See, e.g., Ansubel. et. al., (eds.), 1993, CURRENT PROTOCOLS IN MOLECULAR BIOLOGY, John Wiley & Sons, NY, and Kreigler, 1990. GENE TRANSFER AND EXPRESSION. A LABORATORY MANUAL. Stockton Stress, NY; Shilo and Weinberg, 1981, Proc. Natl. Acad. Sci. U.S.A. 78: 6789-6792.

[0067] Conservative Mutations

[0068] In addition to naturally-occurring allelic variants of NOVX sequences that may exist in the population, the skilled artisan will further appreciate that changes can be introduced by mutation into the nucleotide sequences of SEQ ID NO: 2n−1, wherein n is an integer between 1 and 88, thereby leading to changes in the amino acid sequences of the encoded NOVX protein, without altering the functional ability of that NOVX protein. For example, nucleotide substitutions leading to amino acid substitutions at “non-essential” amino acid residues can be made in the sequence of SEQ ID NO: 2n, wherein n is an integer between 1 and 88. A “non-essential” amino acid residue is a residue that can be altered from the wild-type sequences of the NOVX proteins without altering their biological activity, whereas an “essential” amino acid residue is required for such biological activity. For example, amino acid residues that are conserved among the NOVX proteins of the invention are predicted to be particularly non-amendable to alteration. Amino acids for which conservative substitutions can be made are well-known within the art.

[0069] Another aspect of the invention pertains to nucleic acid molecules encoding NOVX proteins that contain changes in amino acid residues that are not essential for activity. Such NOVX proteins differ in amino acid sequence from SEQ ID NO: 2n−l, wherein n is an integer between 1 and 88, yet retain biological activity. In one embodiment, the isolated nucleic acid molecule comprises a nucleotide sequence encoding a protein, wherein the protein comprises an amino acid sequence at least about 40% homologous to the amino acid sequences of SEQ ID NO: 2n, wherein n is an integer between 1 and 88. Preferably, the protein encoded by the nucleic acid molecule is at least about 60% homologous to SEQ ID NO: 2n, wherein n is an integer between 1 and 88; more preferably at least about 70% homologous to SEQ ID NO: 2n, wherein n is an integer between 1 and 88; still more preferably at least about 80% homologous to SEQ ID NO: 2n, wherein n is an integer between 1 and 88; even more preferably at least about 90% homologous to SEQ ID NO: 2n, wherein n os an initerger between 1 and 88; and most preferably at least about 95% honologous to SEQ ID NO: 2n, wherein n is an integer between 1 and 88.

[0070] An isolated nucleic acid molecule encoding a NOVX protein homologous to the protein of SEQ ID NO: 2n, wherein n is an integer between 1 and 88. can be created by introducing one or more nucleotide substitutions, additions or deletions into the nucleotide sequence of SEQ ID NO: 2n−1, wherein n is an integer between 1 and 88. such that one or more amino acid substitutions, additions or deletions are introduced into the encoded protein.

[0071] Mutations can be introduced any one of SEQ ID NO: 2n−1, wherein n is an integer between 1 and 88, by standard techniques, such as site-directed mutagenesis and PCR-mediated mutagenesis. Preferably conservative amino acid substitutions are made at one or more predicted, non-essential amino acid residues. A “conservative amino acid substitution” is one in which the amino acid residue is replaced with an amino acid residue having a similar side chain. Families of amino acid residues having similar side chains have been defined within the art. These families include amino acids with basic side chains (e.g., lysine, arginine, histidine), acidic side chains (e.g., aspartic acid, glutamic acid), uncharged polar side chains (e.g., glycine, asparagine, glutamine, serine, therein, tyrosine, cysteine), nonpolar side chains (e g., alanine, valine, leucine, isoleucine, proline, phenylalanine, methionine, tryptophan), beta-branched side chains (e.g., threonine, valine, isoleucine) and aromatic side chains (e.g., tyrosine, phenylalanine, tryptophan, histidine). Thus, a predicted non-essential amino acid residue in the NOVX protein is replaced with another amino acid residue from the same side chain family. Alternatively, in another embodiment, mutations can be introduced randomly along all or part of a NOVX coding sequence, such as by saturation mutagenesis, and the resultant mutants can be screened for NOVX biological activity to identify mutants that retain activity. Following mutagenesis of a nucleic acid of SEQ ID NO: 2n−1, wherein n is an integer between 1 and 88, the encoded protein can be expressed by any recombinant technology known in the art and the activity of the protein can be determined.

[0072] The relatedness of amino acid families may also be determined based on side chain interactions. Substituted amino acids may be fully conserved “strong” residues or fully conserved “weak” residues. The “strong” group of conserved amino acid residues may be any one of the following groups: STA, NEQK, NHQK, NDEQ, QHRK, MILV, MILF, HY, FYW, wherein the single letter amino acid codes are grouped by those amino acids that may be substituted for each other. Likewise, the “weak” group of conserved residues may be any one of the following: CSA, ATV, SAG, STNK, STPA, SGND, SNDEQK, NDEQHK, NEQHRK, HFY, wherein the letters within each group represent the single letter amino acid code.

[0073] In one embodiment, a mutant NOVX protein can be assayed for (i) the ability to form protein:protein interactions with other NOVX proteins, other cell-surface proteins, or biologically-active portions thereof, (ii) complex formation between a mutant NOVX protein and a NOVX ligand; or (iii) the ability of a mutant NOVX protein to bind to an intracellular target protein or biologically-active portion thereof; (e.g., avidin proteins).

[0074] In yet another embodiment, a mutant NOVX protein can be assayed for the ability to regulate a specific biological function (e.g.. regulation of insulin release).

[0075] Antisense Nucleic Acids

[0076] Another aspect of the invention pertains to isolated antisense nucleic acid molecules that are hybridizable to or complementary to the nucleic acid molecule comprising the nucleotide sequence of SEQ ID NO: 2n−1, wherein n is an integer between 1 and 88, or fragments, analogs or derivatives thereof. An “antisense” nucleic acid comprises a nucleotide sequence that is complementary to a “sense” nucleic acid encoding a protein (e.g., complementary to the coding strand of a double-stranded cDNA molecule or complementary to an mRNA sequence). In specific aspects, antisense nucleic acid molecules are provided that comprise a sequence complementary to at least about 10, 25, 50, 100, 250 or 500 nucleotides or an entire NOVX coding strand, or to only a portion thereof. Nucleic acid molecules encoding fragments, homologs, derivatives and analogs of a NOVX protein of SEQ ID NO: 2n, wherein n is an integer between 1 and 88, or antisense nucleic acids complementary to a NOVX nucleic acid sequence of SEQ ID NO: 2n−1, wherein n is an integer between 1 and 88, are additionally provided.

[0077] In one embodiment, an antisense nucleic acid molecule is antisense to a “coding region” of the coding strand of a nucleotide sequence encoding a NOVX protein. The term “coding region” refers to the region of the nucleotide sequence comprising codons which are translated into amino acid residues. In another embodiment, the antisense nucleic acid molecule is antisense to a “noncoding region” of the coding,, strand of a nucleotide sequence encoding the NOVX protein. The term “noncoding region” refers to 5′ and 3′ sequences which flank the coding region that are not translated into amino acids (i.e., also referred to as 5′ and 3′ untranslated regions).

[0078] Given the coding strand sequences encoding the NOVX protein disclosed herein, antisense nucleic acids of the invention can be designed according to the rules of Watson and Crick or Hoogsteen base pairing. The antisense nucleic acid molecule can be complementary to the entire coding region of NOVX mRNA, but more preferably is an oligonucleotide that is antisense to only a portion of the coding or noncoding region of NOVX mRNA. For example, the antisense oligonucleotide can be complementary to the region surrounding the translation start site of NOVX mRNA. An antisense oligonucleotide can be, for example, about 5, 10, 15, 20, 25 30, 35. 40, 45 or 50 nucleotides in length. An antisense nucleic acid of the invention can be constructed using chemical synthesis or enzymatic ligation reactions using procedures known in the art. For example, an antisense nucleic acid (e.g., an antisense oligonucleotide can be chemically synthesized using naturally-occurring nucleotides or variously modified nucleotides designed to increase the biological stability of the molecules or to increase the physical stability of the duplex formed between the antisense and sense nucleic acids (e g., phosphorothioate derivatives and acridine substituted nucleotides can be used).

[0079] Examples of modified nucleotides that can be used to generate the antisense nucleic acid include: 5-fluorouracil, 5-bromouracil, 5-chlorouracil, 5-iodouracil, hypoxanthine, xanthine, 4-acetylcytosine, 5-carboxymethylaminomethyl-2-thiouridine, 5-(carboxyhydroxylmethyl)uracil, 5-carboxymethylaminomethyluracil, dihydrouracil, beta-D-galactosylqueosine, inosine, N6-isopentenyladenine, 1-methylguanine, 1-methylinosine, 2,2-dimethylguanine, 2-methyladenine, 2-methylguanine, 5-methoxyuracil, 3-methylcytosine, 5-methylcytosine, N6-adenine, 7-methylguanine, 5-methylaminomethyluracil, 5-methoxyaminomethyl-2-thiouracil, 2-thiouracil, 4-thiouracil, beta-D-mannosylqueosine, 5′-methoxycarboxymethyluracil, 2-methylthio-N6-isopentenyladenine, uracil-5-oxyacetic acid (v), wybutoxosine, pseudouracil, queosine, 2-thiocytosine, 5-methyl-2-thiouracil, 5-methyluracil, uracil-5-oxyacetic acid methylester, uracil-5-oxyacetic acid (v), 5-methyl-2-thiouracil, 3-(3 -amino-3-N-2-carboxypropyl) uracil, (acp3)w, and 2,6-diaminopurine. Alternatively, the antisense nucleic acid can be produced biologically using an expression vector into which a nucleic acid has been subcloned in an antisense orientation (i.e., RNA transcribed from the inserted nucleic acid will be of an antisense orientation to a target nucleic acid of interest, described further in the following subsection).

[0080] The antisense nucleic acid molecules of the invention are typically administered to a subject or generated in situ such that they hybridize with or bind to cellular mRNA and/or genomic DNA encoding a NOVX protein to thereby inhibit expression of the protein (e g., by inhibiting transcription and/or translation). The hybridization can be by conventional nucleotide complemenitarity to form a stable duplex, or, for example, in the case of an antisense nucleic acid molecule that binds to DNA duplexes, through specific interactions in the major groove of the double helix. An example of a route of administration of antisense nucleic acid molecules of the invention includes direct injection at a tissue site. Alternatively, antisense nucleic acid molecules can be modified to target selected cells and then administered systemically. For example, for systematic administration, antisense molecules can be modified such that they specifically bind to receptors or antigens expressed on a selected cell surface (e.g., by linking the antisense nucleic acid molecules to peptides or antibodies that bind to cell surface receptors or antigens). The antisense nucleic acid molecules can also be delivered to cells using the vectors described herein. To achieve sufficient nucleic acid molecules, vector constructs in which the antisense nucleic acid molecule is placed under the control of a strong pol II or pol III promoter are preferred.

[0081] In yet another embodiment, the antisense nucleic acid molecule of the invention is an α-anomeric nucleic acid molecule. An α-anomeric nucleic acid molecule forms specific double-stranded hybrids with complementary RNA in which, contrary to the usual β-units, the strands run parallel to each other. See, e.g., Gaultier, et. al., 1987, Nucl. Acids Res. 15: 6625-6641. The antisense nucleic acid molecule can also comprise a 2′-o-methylribonucleotide (See, e.g., Inoue, et. al., 1987, Nucl. Acids Res. 15: 6131-6148) or a chimeric RNA-DNA analogue (See, e.g., Inoue, et. al., 1987, FEBS Lett. 215: 327-330.

[0082] Ribozymes and PNA Moieties

[0083] Nucleic acid modifications include, by way of non-limiting example, modified bases, and nucleic acids whose sugar phosphate backbones are modified or derivatized. These modifications are carried out at least in part to enhance the chemical stability of the modified nucleic acid, such that they may be used, for example, as antisense binding nucleic acids in therapeutic applications in a subject.

[0084] In one embodiment, an antisense nucleic acid of the invention is a ribozyme. Ribozymes are catalytic RNA molecules with ribonuclease activity that are capable of cleaving a single-stranded nucleic acid, such as an mRNA, to which they have a complementary region. Thus, ribozymes (e.g., hammerhead ribozymes as described in Haselhoff and Gerlach 1988. Nature 334: 585-591) can be used to catalytically cleave NOVX mRNA transcripts to thereby inhibit translation of NOVX mRNA. A ribozyme having specificity for a NOVX-encoding nucleic acid can be designed based upon the nucleotide sequence of a NOVX cDNA disclosed herein (i e.. SEQ ID NO: 2n−1, wherein n is an integer between 1 and 88). For example, a derivative of a Tetrahymena L-19 IVS RNA can be constructed in which the nucleotide sequence of the active site is complementary to the nucleotide sequence to be cleaved in a NOVX-encoding mRNA. See, e.g, U.S. Pat. No. 4,987,071 to Cech, et. al., and U.S. Pat. No. 5,116,742 to Cech, et. al., NOVX mRNA can also be used to select a catalytic RNA having a specific ribonuclease activity from a pool of RNA molecules. See, e.g., Bartel et. al., (1993) Science 261:1411-1418.

[0085] Alternatively, NOVX gene expression can be inhibited by targeting nucleotide sequences complementary to the regulatory region of the NOVX nucleic acid (e g., the NOVX promoter and/or enhancers) to form triple helical structures that prevent transcription of the NOVX gene in target cells. See, e.g, Helene 1991. Anticancer Drug Des. 6: 569-84; Helene, et. al., 1992, Ann. N.Y. Acad. Sci. 660: 27-36;Maher, 1992, Bioassays 14: 807-15.

[0086] In various embodiments, the NOVX nucleic acids can be modified at the base moiety, sugar moiety or phosphate backbone to improve, e.g., the stability, hybridization, or solubility of the molecule. For example, the deoxyribose phosphate backbone of the nucleic acids can be modified to generate peptide nucleic acids. See, e.g., Hyrup, et. al., 1996. Biorg. Med. Chem. 4: 5-23. As used herein, the terms “peptide nucleic acids” or “PNAs” refer to nucleic acid Mimics (e.g., DNA mimics) in which the deoxyribose phosphate backbone is replaced by a pseudopeptide backbone and only the four natural nucleotide bases are retained. The neutral backbone of PNAs has been shown to allow for specific hybridization to DNA and RNA under conditions of low ionic strength. The synthesis of PNA oligomer can be performed using standard solid phase peptide synthesis protocols as described in Hyrup, et. al., 1996, supra; Perry-O'Keefe, et. al., 1996. Proc. Natl. Acad. Sci. USA 93: 14670-14675.

[0087] PNAs of NOVX can be used in therapeutic and diagnostic applications. For example, PNAs can be used as antisense or antigene agents for sequence-specific modulation of gene expression by, e.g., inducing transcription or translation arrest or inhibiting replication. PNAs of NOVX can also be used, for example, in the analysis of single base pair mutations in a gene (e.g., PNA directed PCR clamping; as artificial restriction enzymes when used in combination with other enzymes, e.g., S₁ nucleases (See, Hyrup, et al., 1996. supra); or as probes or primers for DNA sequence and hybridization (See, Hyrup, et. al., 1996, supra;

[0088] Perry-O'Keefe, et. al., 1996, supra).

[0089] In another embodiment, PNAs of NOVX can be modified, e.g., to enhance their stability or cellular uptake, by attaching lipophilic or other helper groups to PNA, by the formation of PNA-DNA chimeras, or by the use of liposomes or other techniques of drug delivery known in the art. For example, PNA-DNA chimeras of NOVX can be generated that may combine the advantageous properties of PNA and DNA. Such chimeras allow DNA recognition enzymes (e.g., RNase H and DNA polymerases) to interact with the DNA portion while the PNA portion should provide binding affinity and specificity. PNA-DNA chimeras can be linked using linkers of appropriate lengths selected in terms of base stacking number of bonds between the nucleotide bases, and orientation (see, Hyrup, et. al., 1996, supra). The synthesis of PNA-DNA chimeras can be performed as described in Hyrup, et. al., 1996. supra and Finn, et. al., 1996, Nucl. Acids Res. 24: 3357-3363. For example, a DNA chain can be synthesized on a solid support using standard phosphoramidite coupling chemistry, and modified nucleoside analogs, e.g., 5′-(4-methoxytrityl)amino-5′-deoxy-thymidine phosphoramidite, can be used between the PNA and the 5′ end of DNA. See, e.g., Mag, et. al., 1989, Nucl. Acid Res. 17: 5973-5988. PNA monomers are then coupled in a stepwise manner to produce a chimeric molecule with a 5′ PNA segment and a 3′ DNA segment. See, e.g., Finn, et. al., 1996, supra. Alternatively, chimeric molecules can be synthesized with a 5′ DNA segment and a 3′ PNA segment. See, e.g., Petersen, et. al., 1975. Bioorg. Med. Chem. Lett. 5: 1119-11124.

[0090] In other embodiments, the oligonucleotide may include other appended groups such as peptides (e_g., for targeting host cell receptors in vivo), or agents facilitating transport across the cell membrane (see, e.g., Letsinger, et al., 1989, Proc. Natl. Acad. Sci. U.S.A. 86: 6553-6556; Letsinger, et. al., 1987. Proc. Natl. Acad. Sci. 84: 648-652; PCT Publication No. WO88/09810) or the blood-brain barrier (see, e.g., PCT Publication No. WO 89/10134). In addition, oligonucleotides can be modified with hybridization triggered cleavage agents (See, e g., Krol, et. al., 1988, BioTechniques 6:958-976) or intercalating agents (see, e.g., Zon, 1988. Pharm. Res. 5: 539-549). To this end, the oligonucleotide may be conjugated to another molecule, e.g., a peptide, a hybridization triggered cross-linking agent, a transport agent, a hybridization-triggered cleavage agent, and the like.

[0091] NOVX Polypeptides

[0092] A polypeptide according to the invention includes a polypeptide including the amino acid sequence of NOVX polypeptides whose sequences are provided in any one of SEQ ID NO: 2n, wherein n is an integer between 1 and 88. The invention also includes a mutant or variant protein any of whose residues may be changed from the corresponding residues shown in any one of SEQ ID NO: 2n, wherein n is an integer between 1 and 88, while still encoding a protein that maintains its NOVX activities and physiological functions or a functional fragment thereof.

[0093] In general, a NOVX variant that preserves NOVX-like function includes any variant in which residues at a particular position in the sequence have been substituted by other amino acids, and further include the possibility of inserting, all additional residue or residues between two residues of the parent protein as well as the possibility of deleting one or mole residues from the parent sequence. Any amino acid substitution, insertion, or deletion is encompassed by the invention. In favorable circumstances,the substitution is a conservative substitution as defined above.

[0094] One aspect of the invention pertains to isolated NOVX proteins, and biologically-active portions thereof, or derivatives, fragments, analogs or homologs thereof. Also provided are polypeptide fragments suitable for use as immunogenic to raise anti-NOVX antibodies. In one embodiment, native NOVX proteins can be isolated from cells or tissue sources by an appropriate purification scheme using standard protein purification techniques. In another embodiment, NOVX proteins are produced by recombinant DNA techniques. Alternative to recombinant expression, a NOVX protein or polypeptide can be synthesized chemically using standard peptide synthesis techniques.

[0095] An “isolated” or “purified” polypeptide or protein or biologically-active portion thereof is substantially free of cellular material or other contaminating proteins from the cell or tissue source from which the NOVX protein is derived, or substantially free from chemical precursors or other chemicals when chemically synthesized. The language “substantially free of cellular material” includes preparations of NOVX proteins in which the protein is separated from cellular components of the cells from which it is isolated or recombinantly-produced. In one embodiment, the language “substantially free of cellular material” includes preparations of NOVX proteins having less than about 30% (by dry weight) of non-NOVX proteins (also referred to herein as a “contaminating protein”), more preferably less than about 20% of non-NOVX proteins, still more preferably less than about 10% of non-NOVX proteins, and most preferably less than about 5% of non-NOVX proteins. When the NOVX protein or biologically-active portion thereof is recombiniantly-produced, it is also preferably substantially free of culture medium, i.e., culture medium represents less than about 20%, more preferably less than about 10%, and most preferably less than about 5% of the volume of the NOVX protein preparation.

[0096] The language “substantially free of chemical precursors or other chemicals” includes preparations of NOVX proteins in which the protein is separated from chemical precursors or other chemicals that are involved in the synthesis of the protein. In one embodiment, the language “substantially free of chemical precursors or other chemicals” includes preparations of NOVX proteins having less than about 30% (by dry weight) of chemical precursors or non-NOVX chemicals, more preferably less than about 20% chemical precursors or non-NOVX chemicals, still more preferably less than about 10% chemical precursors or non-NOVX chemicals, and most preferably less than about 5% chemical precursors or non-NOVX chemicals.

[0097] Biologically-active portions of NOVX proteins include peptides comprising amino acid sequences sufficiently homologous to or derived from the amino acid sequences of the NOVX proteins (e.g., the amino acid sequence of SEQ ID NO: 2n, wherein n is an integer between 1 and 88) that include fewer amino acids than the full-length NOVX proteins, and exhibit at least one activity of a NOVX protein. Typically, biologically-active portions comprise a domain or motif with at least one activity of the NOVX protein. A biologically-active portion of a NOVX protein can be a polypeptide which is, for example, 10, 25, 50, 100 or more amino acid residues in length.

[0098] Moreover, other biologically-active portions, in which other regions of the protein are deleted, can be prepared by recombinant techniques and evaluated for one or more of the functional activities of a native NOVX protein.

[0099] In an embodiment, the NOVX protein has an amino acid sequence of SEQ ID NO: 2n, wherein n is an integer between 1 and 88. In other embodiments, the NOVX protein is substantially homologous to SEQ ID NO: 2n, wherein n is an integer between 1 and 88, and retains the functional activity of the protein of SEQ ID NO: 2n, wherein n is an integer between 1 and 88, yet differs in amino acid sequence due to natural allelic variation or mutagenesis, as described in detail, below. Accordingly, in another embodiment, the NOVX protein is a protein that comprises an amino acid sequence at least about 45% homologous to the amino acid sequence of SEQ ID NO: 2n, wherein n is an integer between 1 and 88, and retains the functional activity of the NOVX proteins of SEQ ID NO: 2n, wherein n is an integer between 1 and 88.

[0100] Determining Homology Between Two or More Sequences

[0101] To determine the percent homology of two amino acid sequences or of two nucleic the sequences arc aligned for optimal comparison purposes (e.g, gaps can be introduced in the sequence of a first amino acid or nucleic acid sequence for optimal alignment with a second amino or nucleic acid sequence). The amino acid residues or nucleotides at corresponding amino acid positions or nucleotide positions arc then compared. When a position in the first sequence is occupied by the same amino acid residue or nucleotide as the corresponding position in the second sequence, then the molecules are homologous at that position (i.e., as used herein amino acid or nucleic acid “homology” is equivalent to amino acid or nucleic acid “identity”).

[0102] The nucleic acid sequence homology may be determined as the degree of identity between two sequences. The homology may be determined using computer programs known in the art, such as GAP software provided in the GCG program package. See, Needleman and Wunsch, 1970. J. Mol. Biol. 48: 443-453. Using GCG GAP software with the following settings for nucleic acid sequence comparison: GAP creation penalty of 5.0 and GAP extension penalty of 0.3, the coding region of the analogous nucleic acid sequences referred to above exhibits a degree of identity preferably of at least 70%, 75%, 80%, 85%, 90%, 95%, 98%, or 99%, vitl the CDS (encoding) part of the DNA sequence of SLQ ID NO: 2n−1, wherein n is an integer between 1 and 88.

[0103] The term “sequence identity” refers to the degree to which two polynucleotide or polypeptide sequences are identical on a residue-by-residue basis ovei a particular region of comparison. The term “percentage of sequence identity” is calculated by comparing two optimally aligned sequences over that region of comparison, determining, the number of positions at which the identical nucleic acid base (e.g., A, T, C, G, U, or I, in the case of nucleic acids) occurs in both sequences to yield the number of matched positions, dividing the number of matched positions by the total number of positions in the region of comparison (i.e., the window size), and multiplying the result by 100 to yield the percentage of sequence identity. The term “substantial identity” as used herein denotes a characteristic of a polynucleotide sequence, wherein the polynucleotide comprises a sequence that has at least 80 percent sequence identity, preferably at least 85 percent identity and often 90 to 95 percent sequence identity, more usually at least 99 percent sequence identity as compared to a reference sequence over a comparison region.

[0104] Chimeric and Fusion Proteins

[0105] The invention also provides NOVX chimeric or fusion proteins. As used herein, a NOVX “chimeric protein” or “fusion protein” comprises a NOVX polypeptide operatively-linked to a non-NOVX polypeptide. An “NOVX polypeptide” refers to a polypeptide having an amino acid sequence corresponding to a NOVX protein of SEQ ID NO: 2n, wherein n is an integer between 1 and 88, whereas a “non-NOVX polypeptide” refers to a polypeptide having an amino acid sequence corresponding to a protein that is not substantially homologous to the NOVX protein, e.g., a protein that is different from the NOVX protein and that is derived from the same or a different organism. Within a NOVX fusion protein tie NOVX polypeptide can correspond to all or a portion of a NOVX protein. In one embodiment, a NOVX fusion protein comprises at least one biologically-active portion of a NOVX protein. In another embodiment, a NOVX fusion protein comprises at least two biologically-active portions of a NOVX protein. In yet another embodiment, a NOVX fusion protein comprises at least three biologically-active positions of a NOVX protein. Within the fusion protein, the term “operatively-linked” is intended to indicate that the NOVX polypeptide and the non-NOVX polypeptide are fused in-flame with one another. The non-NOVX polypeptide can be fused to the N-terminus or C-terminus of the NOVX polypeptide.

[0106] In one embodiment, the fusion protein is a GST-NOVX fusion protein in which the NOVX sequences are fused to the C-terminus of the GST (glutathione S-transferase) sequences. Such fusion proteins can facilitate the purification of recombinant NOVX polypeptides.

[0107] In another embodiment, the fusion protein is a NOVX protein containing a heterologous signal sequence at its N-terminus. In certain host cells (e.g., mammalian host cells), expression and/or secretion of NOVX can be increased through use of a heterologous signal sequence.

[0108] In yet another embodiment, the fusion protein is a NOVX-immunoglobulin fusion protein in which the NOVX sequences are fused to sequences derived from a member of the immunoglobin protein family. The NOVX immunoglobulin fusion proteins of the invention can be incorporated into pharmaceutical compositions and administered to a subject to inhibit an interaction between a NOVX ligand and a NOVX protein on the surface of a cell, to thereby suppress NOVX-mediated signal transduction in vivo. The NOVX-immunoglobulin fusion proteins can be used to affect the bioavailability of a NOVX cognate ligand. Inhibition of the NOVX ligand/NOVX interaction may be useful therapeutically for both the treatment of proliferative and differentiate disorders, as well as modulating (e.g. promoting or inhibiting) cell survival. Moreover, the NOVX-immunoglobulin fusion proteins of the invention can be used as immunogens to produce anti-NOVX antibodies in a subject, to purify NOVX ligands, and in screening assays to identify molecules that inhibit the interaction of NOVX with a NOVX ligand.

[0109] A NOVX chimeric or fusion protein of the invention can be produced by standard recombinant DNA techniques. For example, DNA fragments coding for the different polypeptide sequences are ligated together in-frame in accordance with conventional techniques, e.g, by employing blunt-ended or stagger-ended termini for ligation, restriction enzyme digestion to provide for appropriate termini, filling-in of cohesive ends as appropriate, alkaline phosphatase treatment to avoid undesirable joining, and enzymatic ligation. In another embodiment, the fusion gene can be synthesized by conventional techniques including automated DNA synthesizers. Alternatively. PCR amplification of gene fragments can be carried out using anchor primers that give rise to complementary overhangs between two consecutive gene fragments that can be subsequently be annealed and reamplified to generate a chimeric gene sequence (see, e.g., Ausubel, et. al. (eds.) CURRENT PROTOCOLS IN MOLECULAR BIOLOGY, John Wiley & Sons, 1992). Moreover, many expression vectors are commercially available that already encode a fusion moiety (e.g., a GST polypeptide). A NOVX-encoding, nucleic acid can be cloned into such an expression vector such that the fusion moiety is linked in-frame to the NOVX protein.

[0110] NOVX Agonists and Antagonists

[0111] The invention also pertains to variants of the NOVX proteins that function as either NOVX agonists (i.e., mimetics) or as NOVX antagonists. Variants of the NOVX protein can be generated by mutagenesis (e g, discrete point mutation or truncation of the NOVX protein). An agonist of the NOVX protein can retain substantially the same, or a subset of, the biological activities of the naturally occurring form of the NOVX protein. An antagonist of the NOVX protein can inhibit one or more of the activities of the naturally occurring form of the NOVX protein by, for example, competitively binding to a downstream or upstream member of a cellular signaling cascade which includes the NOVX protein. Thus, specific biological effects can be elicited by treatment with a variant of limited function. In one embodiment, treatment of a subject with a variant having a subset of the biological activities of the naturally occurring form of the protein has fewer side effects in a subject relative to treatment with the naturally occurring form of the NOVX proteins.

[0112] Variants of the NOVX proteins that function as either NOVX agonists (i.e., mimetics) or as NOVX antagonists can be identified by screening combinatorial libraries of mutants (e.g., truncation mutants) of the NOVX proteins for NOVX protein agonist or antagonist activity. In one embodiment, a variegated library of NOVX variants is generated by combinatorial mutagenesis at the nucleic acid level and is encoded by a variegated gene library. A variegated library of NOVX variants can be produced by, for example, enzymatically ligating a mixture of synthetic oligonucleotides into gene sequences such that a degenerate set of potential NOVX sequences is expressible as individual polypeptides, or alternatively, as a set of larger fusion proteins (e.g., for phage display) containing the set of NOVX sequences therein. There are a variety of methods which can be used to produce libraries of potential NOVX variants from a degenerate oligonucleotide sequence. Chemical synthesis of a degenerate gene sequence can be performed in an automatic DNA synthesizer, and the synthetic gene then ligated into an appropriate expression vector. Use of a degenerate set of genes allows for the provision, in one mixture, of all of the sequences encoding the desired set of potential NOVX sequences. Methods for synthesizing degenerate oligonucleotides are well-known within the art. See, e.g., Naranig, 1983. Tetrahedron39: 3; Itakura, et. al., 1984. Annu. Rev. Biochem. 53: 323; Itakura, et. al., 1984. Science 198: 1056; Ike, et. al., 1983, Nucl. Acids Res. 11: 477.

[0113] Polypeptide Libraries

[0114] In addition, libraries of fragments of the NOVX protein coding sequences can be used to generate a variegated population of NOVX fragments for screening and subsequent selection of variants of a NOVX protein. In one embodiment, a library of coding sequence fragments can be generated by treating a double stranded PCR fragment of a NOVX coding sequence with a nuclease under conditions wherein nicking occurs only about once per molecule, denaturing the double stranded DNA, renaturing the DNA to form double-stranded DNA that can include sense/antisense pairs from different nicked products, removing single stranded portions from reformed duplexes by treatment with S₁ nuclease, and ligating the resulting fragment library into an expression vector. By this method, expression libraries can be derived which encodes N-terminal and internal fragments of various sizes of the NOVX proteins.

[0115] Various techniques are known in the art for screening gene products of combinatorial libraries made by point mutations or truncation, and for screening cDNA libraries for gene products having a selected property. Such techniques are adaptable for rapid screening of the gene libraries generated by the combinatorial mutagenesis of NOVX proteins. The most widely used techniques, which are amenable to high throughput analysis, for screening large gene libraries typically include cloning the gene library into replicable expression vectors, transforming appropriate cells with the resulting library of vectors, and expressing the combinatorial genes under conditions in which detection of a desired activity facilitates isolation of the vector encoding the gene whose product was detected. Recursive ensemble mutagenesis (REM), a new technique that enhances the frequency of functional mutants in the libraries, can be used in combination with the screening assays to identify NOVX variants. See, e.g., Arkin anid Yourvan, 1992, Proc. Natl. Acad. Sci. USA 89: 7811-7815; Delgrave, et. al., 1993. Protein Engineering 6:327-331.

[0116] Anti-NOVX Antibodies

[0117] Included in the invention are antibodies to NOVX proteins, or fragments of NOVX proteins. The term “antibody” as used herein refers to immunoglobin molecules and immunologically active portions of immunoglobulin (Ig) molecules, i.e., molecules that contain an antigen binding site that specifically binds (immunoreacts with ) an antigen. Such antibodies include, but are not limited to, polyclonal, monoclonal, chimeric, single chain, F_{ab}, F_{ab}, and F_{(ab′)2} fragments and an F_{ab} expression library. In general antibody molecules obtained from humans relates to any of the classes IgG, IgM, IgA, IgE and IgD, which differ from one another by the nature of the heavy chain present in the molecule. Certain classes have subclasses as well, such as IgG₁, IgG₂, and others. Furthermore, in humans, the light chain may be a kappa chain or a lambda chain. Reference herein to antibodies includes a reference to all such classes, subclasses and types of human antibody species.

[0118] An isolated protein of the invention intended to serve as an antigen, or a portion or fragment thereof, can be used as an immunogen to generate antibodies that immunospecifically bind the antigen, using standard techniques for polyclonal and monoclonal antibody preparation. The full-length protein can be used or, alternatively, the invention provides antigenic peptide fragments of the antigen for use as immunogens. An antigenic peptide fragment comprises at least 6 amino acid residues of the amino acid sequence of the full length protein, such as an amino acid sequence of SEQ ID NO: 2n, wherein n is an integer between 1 and 88, and encompasses an epitope thereof such that an antibody raised against the peptide forms a specific immune complex with the full length protein or with any fragment that contains the epitope. Preferably, the antigenic peptide comprises at least 10 amino acid residues, or at least 15 amino acid residues, or at least 20 amino acid residues, or at least 30 amino acid residues. Preferred epitopes encompassed by the antigenic peptide arc regions of the protein that are located on its surface; commonly these are hydrophilic regions.

[0119] In certain embodiments of the invention, at least one epitope encompassed by the antigenic peptide is a region of NOVX that is located on the surface of the protein, e.g., a hydrophilic region. A hydrophobicity analysis of the human NOVX protein sequence will indicate which regions of a NOVX polypeptide are particularly hydrophilic and, therefore, are likely to encode surface residues useful for targeting antibody production. As a means for targeting antibody production, hydropathy plots showing regions of hydrophilicity and hydrophobicity may be generated by any method well known in the art, including, for example, the Kyte Doolittle or the Hopp Woods methods, either with or without Fourier transformation. See, e.g., Hopp and Woods, 1981, Proc. Natl. Acad. Sci. USA 78: 3824-3828; Kyte and Doolittle 1982, J. Mol. Biol., 157: 105-142. each incorporated herein by reference in their entirety. Antibodies that arc specific for one or more domains within an antigenic protein, or derivatives, fragments, analogs or homologs thereof, are also provided herein.

[0120] The term “epitope” includes any protein determinant capable of specific binding to an immunoglobulin or T-cell receptor. Epitopic determinants usually consist of chemically active surface groupings of molecules such as amino acids or sugar side chains and usually have specific three dimensional structural characteristics, as well as specific charge characteristics. A NOVX polypeptide or a fragment thereof comprises at least one antigenic epitope. An anti-NOVX antibody of the present invention is said to specifically bind to antigen NOVX when the equilibrium binding constant (K_{D}) is <1 μM, preferably <100 nM, more preferably <10 nM, and most preferably <100 pM to about 1 pM, as measured by assays such as radioligand binding assays or similar assays known to those skilled in the art.

[0121] A protein of the invention, or a derivative, fragment, analog, homolog or ortholog thereof, may be utilized as an immunogen in the generation of antibodies that immunospecifically bind these protein components.

[0122] Various procedures known within the art may be used for the production of polyclonal or monoclonal antibodies directed against a protein of the invention, or against derivatives, fragments, analogs homologs or orthologs thereof (see, for example, Antibodies: A Laboratory Manual, Harlow E, and Lane D, 1988, Cold Spring Harbor Laboratory Press, Cold Spring, Harbor, NY, incorporated herein by reference). Some of these antibodies are discussed below.

[0123] Polyclonal Antibodies

[0124] For the production of polyclonal antibodies, various suitable host animals (e.g., rabbit, goat, mouse or other mammal) may be immunized by one or more injections with the native protein, a synthetic variant thereof, or a derivative of the foregoing. An appropriate immunogenic preparation can contain, for example, the naturally occurring, immunogenic protein, a chemically synthesized polypeptide representing the immunogenic protein, or a recombinantly expressed immunogenic protein. Furthermore, the protein may be conjugated to a second protein known to be immunogenic in the mammal being immunized. Examples of such immunogenic proteins include but are not limited to keyhole limpet hemocyanin, serum albumin, bovine thyroglobulin, and soybean trypsin inhibitor. The preparation can further include an adjuvant. Various adjuvants used to increase the immunological response include, but are not limited to, Freund's (complete and incomplete), mineral gels (e.g aluminum hydroxide), surface active substances (e.g.. lysolecithin, pluronic polyols, polyanions, peptides, oil emulsions, dinitrophenol, etc.), adjuvants usable in humans such as Bacille Calmette-Guerin and Corynebacterium parvum or similar immunostimulatory agents. Additional examples of adjuvants which can be employed include MPL-TDM adjuvant (monophosphoryl Lipid A. synthetic trehalose dicorynomycolate).

[0125] The polyclonal antibody molecules directed against the immunogenic protein can be isolated from the mammal (e g., from the blood) and further purified by well known techniques, such as affinity chromatography using protein A or protein G, which provide primarily the IgG fraction of immune serum. Subsequently, or alternatively, the specific antigen which is the target of the immunoglobulin sought, or an epitope thereof, may be immobilized on a column to purify the immune specific antibody by immunoaffinity chromatography. Purification of immunoglobulins is discussed, for example, by D. Wilkinson (The Scientist, published by The Scientist, Inc., Philadelphia Pa., Vol. 14, No. 8 (Apr. 17, 2000), pp. 25-28).

[0126] Monoclonal Antibodies

[0127] The term “monoclonal antibody” (MAb) or “monoclonal antibody composition”, as used herein, refers to a population of antibody molecules that contain only one molecular species of antibody molecule consisting of a unique light chain gene product and a unique heavy chain gene product. In particular, the complemenitarity determining regions (CDRs) of the monoclonal antibody are identical in all the molecules of the population. MAbs thus contain an antigen binding site capable of immunoreacting with a particular epitope of the antigen characterized by a unique binding affinity for it.

[0128] Monoclonal antibodies can be prepared using hybridoma methods, such as those described by Kohler and Milstein, Nature, 256:495 (1975). In a hybridoma method, a mouse, hamster, or other appropriate host animal, is typically immunized with an immunizing agent to elicit lymphocytes that produce or arc capable of producing antibodies that will specifically bind to the immunizing agent. Alternatively, the lymphocytes can be immunized in vitro.

[0129] The immunizing agent z ill typically include the protein antigen, a fragment thereof or a fusion protein thereof. Generally, either peripheral blood lymphocytes are used if cells of human origin are desired, or spleen cells or lymph node cells are used if non-human mammalian sources are desired. The lymphocytes arc then fused with an immortalized cell line using a suitable fusing agents such as polyethylene glycol, to form a hybridization cell (Goding, Monoclonal Antibodies: Principles and Practice, Academic Press (1986) pp. 59-103). Immortalized cell lines are usually transformed mammalian cells, particularly myeloma cells of rodent, bovine and human origin. Usually, rat or mouse myeloma cell lines are employed. The hybridoma cells can be cultured in a suitable culture medium that preferably contains one or more substances that inhibit the growth or survival of the unfused. immortalized cells. For example, if the parental cells lack the enzyme hypoxanthine guanine phosphoribosyl transferase (HGPRT or HPRT), the culture medium for the hybridomas typically will include hypoxanthine, aminiopterin, and thymidine (“HAT medium”), which substances prevent the growth of HGPRT-deficient cells.

[0130] Preferred immortalized cell lines are those that fuse efficiently support stable high level expression of antibody by the selected antibody-producing cells, and are sensitive to a medium such as HAT medium. More preferred immortalized cell lines are murine myeloma lines, which can be obtained, for instance, from the Salk Institute Cell Distribution Center, San Diego, Calif. and the American Type Culture Collection, Manassas, Va. Human myeloma and mouse-human heteromycloma cell lines also have been described for the production of human monoclonal antibodies (Kozbor, J. Immunol., 133:3001 (1984); Brodeur et. al., Monoclonal Antibody Production Techniques and Applications, Marcel Dekker, Inc., New York, (1987) pp. 51-63).

[0131] The culture medium in which the hybridoma cells are cultured can then be assayed for the presence of monoclonal antibodies directed against the antigen. Preferably, the binding specificity of monoclonal antibodies produced by the hybridoma cells is determined by immunoprecipitation or by an in vitro binding assay, such as radioimmunoassay (RIA) or enzyme-linked immunoabsorbent assay (ELISA). Such techniques and assays are known in the art. The binding affinity of the monoclonal antibody can for example, be determined by the Scatchard analysis of Munson and Pollard, Anal. Biochem., 107:220 (1980). It is an objective especially important in therapeutic applications of monoclonal antibodies, to identify antibodies having a high degree of specificity and a high binding affinity for the target antigen.

[0132] After the desired hybridoma cells are identified, the clones can be subcloned by limiting dilution procedures and grown by standard methods (Goding,1986). Suitable culture media for this purpose include, for example, Dulbecco's Modified Eagle's Medium and RPMI-1640 medium. Alternatively, the hybridoma cells call be grown in vivo as ascites in a

[0133] The monoclonal antibodies secreted by the subclones can be isolated or purified from the culture medium or ascites fluid by conventional immunoglobulin purification procedures Such as, for example, protein A-Sepharose, hydroxylapatite chromatography, gel electrophoresis, dialysis, or affinity chromatography.

[0134] The monoclonal antibodies can also be made by recombinant DNA methods, such as those described in U.S. Pat. No. 4.816,567. DNA encoding the monoclonal antibodies of the invention can be readily isolated and sequenced using conventional procedures (e.g., by using oligonucleotide probes that are capable of binding specifically to genes encoding the heavy and light chains of murine antibodies). The hybridoma cells of the invention serve as a preferred source of such DNA. Once isolated, the DNA can be placed into expression vectors, which are then transfected into host cells such as simian COS cells, Chinese hamster ovary (CHO) cells, or myeloma cells that do not otherwise produce immunoglobulin protein, to obtain the synthesis of monoclonal antibodies in the recombinant host cells. The DNA also can be modified, for example, by substituting the coding sequence for human heavy and light chain constant domains in place of the homologous murine sequences (U.S. Pat. No. 4,816,567; Morrison, Nature 368, 812-13 (1994)) or by covalently joining to the immunoglobulin coding sequence all or part of the coding sequence for a non-immunoglobulin polypeptide. Such a non-immunoglobulin polypeptide can be substituted for the constant domains of an antibody of the invention, or can be substituted for the variable domains of one antigen-combining site of an antibody of the invention to create a chimeric bivalent antibody.

[0135] Humanized Antibodies The antibodies directed against the protein antigens of the invention can further comprise humanized antibodies or human antibodies. These antibodies are suitable for administration to humans without engendering an immune response by the human against the administered immunoglobulin. Humanized forms of antibodies are chimeric immunoglobulins immunoglobulin chains or fragments thereof (such as Fv, Fab, Fab′, F(ab′)₂ or other antigen-blinding subsequences of antibodies) that are principally comprised of the sequence of a human immunoglobulin, and contain minimal sequence derived from a non-human immunoglobulin. Humanization can be performed following the method of Winter and co-workers (Jones et al., Nature, 321:522-525 (1986); Reichmann et. al., Nature, 332:323-327 (1988); Verhoeyen et. al., Science, 239:1534-1536 (1988)), by substituting rodent CDRs or CDR sequences for the corresponding sequences of a human antibody. (See also U.S. Pat. No. 5,225,539.) In some instances, Fv framework residues of the human immunoglobulin in are replaced by corresponding non-human residues. Humanized antibodies can also comprise residues which are found neither in the recipient antibody nor in the imported CDR or framework sequences. In general, the humanized antibody comprise substantially all of at least one, and typically two, variable domains, in which all or substantially all of the CDR regions correspond to those of a non-human immunoglobulin and all or substantially all of the framework regions are those of a human immunoglobulin consensus sequence. The humanized antibody optimally also will comprise at least a portion of an immunoglobulin constant region (Fc), typically that of a human immunoglobulin (Jones et. al., 1986; Reichmann et. al., 1988; and Presta, Curr. Op. Struct. Biol., 2:593-596 (1992)).

[0136] Human Antibodies

[0137] Fully human antibodies essentially relate to antibody molecules in which the entire sequence of both the light chain and the heavy chain, including the CDRs, arise from human genes. Such antibodies are termed “human antibodies”, or “fully human antibodies” herein. Human monoclonal antibodies can be prepared by the trioma technique; the human B-cell hybridoma technique (see Kozbor, et. al., 1983 Immunol Today 4: 72) and the EBV hybridoma technique to produce human monoclonal antibodies (see Cole, et. al., 1985 In: MONOCLONAL ANTIBODIES AND CANCER THERAPY, Alan R. Liss, Inc., pp. 77-96). Human monoclonal antibodies may be utilized in the practice of the present invention and may be produced by using human hybridomas (see Cote, et. al., 1983. Proc. Natl. Acad. Sci. USA 80: 2026-2030) or by transforming human B-cells with Epstein Barr Virus in vitro (see Cole, et. al., 1985 In: MONOCLONAL ANTIBODIES AND CANCER THERAPY, Alan R. Liss, Inc., pp. 77-96).

[0138] In addition, human antibodies can also be produced using additional techniques, including phage display libraries (Hoogenboom and Winter, J. Mol. Biol., 227:381 (1991); Marks et. al., J. Mol. Biol., 222:581 (1991)). Similarly, human antibodies can be made by introducing human immunoglobulin loci into transgenic animals, e.g.. mice in which the endogenous immunoglobulin genes have been partially or completely inactivated. Upon challenge, human antibody production is observed, which closely resembles that seen in humans in all respects, including gene rearrangement, assembly, and antibody repertoire. This approach is described, for example, in U.S. Pat. Nos. 5,545,807; 5,545,806; 5,569,825; 5,625,126; 5,633,425: 5,661 016. and in Marks et. al. (Bio/Technology, 10, 779-783 (1992)); Lonberg et. al. (Nature 368 856-859 (1994)); Morrison (Nature 368.812-13 (1994)); Fishwild et al,.(Nature Biotechnology 14, 845-51 (1996)); Neuberger (Nature Biotechnology 14, 826 (1996)): and Loneberg and Huszar (Intern. Rev. Immunol. 13 65-93 (1995)).

[0139] Human antibodies may additionally be produced using transgenic nonhuman animals which are modified so as to produce fully human antibodies rather than tile animal's endogenous antibodies in response to challenge by an antigen. (See PCT publication WO94/02602). The endogenous genes encoding, the heavy and light immunoglobulin chains in the nonhuman host have been incapacitated, and active loci encoding human heavy and light chain immunoglobulins are inserted into the host's genome. The human genes are incorporated, for example, using yeast artificial chromosomes containing the requisite human DNA segments. An animal which provides all the desired modifications is then obtained as progeny by crossbreeding intermediate transgenic animals containing fewer than the full complement of the modifications. The preferred embodiment of such a nonhuman animal is a mouse, and is termed the Xenomouse™ as disclosed in PCT publications WO 96/33735 and WO 96/34096. This animal produces B cells which secrete fully human immunoglobulins. The antibodies can be obtained directly from the animal after immunization with an immunogen of interest, as, for example, a preparation of a polyclonal antibody, or alternatively from immortalized B cells derived from the animal, such as hybridomas producing monoclonal antibodies. Additionally, tile genes encoding the immunoglobulins with human variable regions can be recovered and expressed to obtain the antibodies directly, or can be further modified to obtain analogs of antibodies such as, for example, single chain Fv molecules.

[0140] An example of a method of producing a nonhuman host, exemplified as a mouse, lacking expression of an endogenous immunoglobulin heavy chain is disclosed in U.S. Pat. No. 5,939,598. It can be obtained by a method including, deleting the J segment genes from at least one endogenous heavy chain locus in an embryonic stem cell to prevent rearrangement of the locus and to prevent formation of a transcript of a rearranged immunoglobulin heavy chain locus, the deletion being effected by a targeting vector containing a gene encoding a selectable marker; and producing from the embryonic stem cell a transgenic mouse somatic and germ cells contain the gene encoding the selectable marker.

[0141] A method for producing an antibody of interest, such as a human antibody, is disclosed in U.S. Pat. No. 5,916,771. It includes introducing an expression vector that contains a nucleotide sequence encoding a heavy chain into one mammalian host cell in culture, introducing an expression vector containing a nucleotide sequence encoding, a light chain into another mammalian host cell, and fusing the two cells to form a hybrid cell. The hybrid cell expresses an antibody containing the heavy chain and the light chain.

[0142] In a further improvement on this procedure, a method for identifying a clinically relevant epitope on an immunogen, and a correlative method for selecting an antibody that binds immunospecifically to the relevant epitope with high affinity, are disclosed in PCT publication WO 99/53049.

[0143] F_{ab} Fragments and Single Chain Antibodies

[0144] According to the invention, techniques can be adapted for the production of single-chain antibodies specific to an antigenic protein of the invention (see e.g., U.S. Pat. No. 4,946,778). In addition, methods can be adapted for the construction of F_{ab} expression libraries (see e.g., Huse, et. al., 1989 Science 246: 1275-1281) to allow rapid and effective identification of monoclonal F_{ab} fragments with the desired specificity for a protein or derivatives, fragment, analogs or homologs thereof. Antibody fragments that contain the idiotypes to a protein antigen may be produced by techniques known in the art including, but not limited to: (i) an F_{(a,b′)2} fragment produced by pepsin digestion of an antibody molecule; (ii) an F_{ab} fragment generated by reducing the disulfide bridges of an F_{(ab′)2} fragment; (iii) an F_{ab} fragment generated by the treatment of the antibody molecule with papain and a reducing agent and (iv) Fᵥ fragments.

[0145] Bispecific Antibodies

[0146] Bispecific antibodies are monoclonal, preferably human or humanized, antibodies that have binding specificities for at least two different antigens. In the present case, one of the binding specificities is for an antigenic protein of the invention. The second binding target is any other antigen, and advantageously is a cell-surface protein or receptor or receptor subunit.

[0147] Methods for making bispecific antibodies are known in the art. Traditionally, the recombinant production of bispecific antibodies is based on the co-expression of two immunoglobulin heavy-chained/light-chain pairs where the two heavy chains have different specificities (Milstein and Cuello, Nature, 305:537-539 (1983)). Because of the random assortment of immunoglobulin heavy and light chains, these hybridomas (quadromas) produce a potential mixture of ten different antibody molecules, of which only one has the correct bispecific structure. The purification of the correct molecule is usually accomplished by affinity chromatography steps. Similar procedures are disclosed in WO 93/08829, published May 13, 1993. and in Traunecker et. al., EMBO. J., 10:3655-3659 (1991).

[0148] Antibody variable domains with the desired binding specificities (antibody-antigen combining, sites) can be fused to immunoglobulins constant domain sequences. The fusion preferably, is with an immunoglobulin heavy-chain constant domain, comprising at least part of the hinge, CH2, and CH3 regions. It is preferred to have the first heavy-chain constant region (CH1) containing the site necessary for light-chain binding present in at least one of the fusions. DNAs encoding the immunoglobulin heavy-chain fusions and if desired, the immunoglobulin light chain, are inserted into separate expression vectors, and are co-transfected into a suitable host organism. For further details of generating bispecific antibodies see, for example, Suresh et. al., Methods in Enzymology, 121:210 (1986).

[0149] According to another approach described in WO 96/27011, the interface between a pair of antibody molecules can be engineered to maximize the percentage of heterodimers which are recovered from recombinant cell culture. The preferred interface comprises at least a part of the CH3 region of an antibody constant domain. In this method, one or more small amino acid side chains from the interface of the first antibody molecule are replaced with larger side chains (e.g. tyrosine or tryptophan). Compensatory “cavities” of identical or similar size to the large side chain(s) are created on the interface of the second antibody molecule by replacing large amino acid side chains with smaller ones (e.g. alanine or threonine). This provides a mechanism for increasing the yield of the heterodimer over other unwanted end-products such as homodimers.

[0150] Bispecific antibodies can be prepared as full length antibodies or antibody fragments (e.g. F(ab′)₂ bispecific antibodies). Techniques for generating bispecific antibodies from antibody fragments have been described in the literature. For example, bispecific antibodies can be prepared using chemical linkage. Brennan et. al., Science 229:81 (1985) describe a procedure wherein intact antibodies are proteolytically cleaved to generate F(ab′)₂ fragments. These fragments are reduced in the presence of the dithiol complexing agent sodium arsenite to stabilize vicinal dithiols and prevent intermolecular disulfide formation. Tile Fab′ fragments generated are then converted to thionitrobenzoate (TNB) derivatives. One of the Fab′-TNB derivatives is then reconverted to the Fab′-thiol by reduction with mercaptoethylamine and is mixed with an equimolar amount of the other Fab′-TNB derivative to form the bispecific antibody. The bispecific antibodies produced can be used as agents for the selective immobilization of enzymes.

[0151] Additionally, Fab′ fragments can be directly recovered from E. coli and chemically coupled to form bispecific antibodies. Shalaby et. al., J. Exp. Med. 175:217-225 (1992) describe the production of a fully humanized bispecific antibody F(ab′)₂ molecule. Each Fab′fragment was separately secreted from E. coli and subjected to directed chemical coupling, in vitro to form the bispecific antibody. The bispecific antibody thus formed was able to bind to cells overexpressing the ErbB2 receptor and normal human T cells, as well as trigger the lytic activity of human cytotoxic lymphocytes against human breast tumor targets.

[0152] Various techniques for making and isolating bispecific antibody fragments directly from recombinant cell culture have also been described. For example, bispecific antibodies have been produced using leucine zippers. Kostelny et. al., J. Immunol. 148(5): 1547-1553 (1992). The leucine zipper peptides from the Fos and Jun proteins were linked to the Fab′ portions of two different antibodies by gene fusion. The antibody homodimers were reduced at the hinge region to form monomers and then re-oxidized to form the antibody heterodimers. This method can also be utilized for the production of antibody homodimers. The “diabody” technology described by Hollinger et. al., Proc. Natl. Acad. Sci. USA 90:6444-6448 (1993) has provided an alternative mechanism for making bispecific antibody fragments. The fragments comprise a heavy-chain variable domain (V_{H}) connected to a light-chain variable domain (V_{L}) by a linker which is too short to allow pairing between the two domains on the same chain. Accordingly, the V_{II} and V_{L} domains of one fragment are forced to pair with the complementary V_{L} and V_{II}, domains of another fragment, thereby forming two antigen-blinding sites. Another strategy for making bispecific antibody fragments by the use of single-chain Fv (sFv) dimers has also been reported. See, Gruber et. al., J. Immunol. 152:5368 (1994).

[0153] Antibodies with more than two valencies are contemplated. For example, trispecific antibodies can be prepared. Tutt et. al., J. Immunol. 147:60 (1991).

[0154] Exemplary bispecific antibodies can bind to two different epitopes, at least one of which originates in the protein antigen of the invention. Alternatively, an anti-antigenic arm of an immunoglobulin molecule can be combined with an arm which binds to a triggering molecule on a leukocyte such as a T-cell receptor molecule (e.g. CD2, CD3, CD28, or B7), or Fc receptors for IgG (FcγR), such as FcγRI (CD64), FcγRII (CD32) and FcγRIII (CD16) so as to focus cellular defense mechanisms to the cell expressing the particular antigen. Bispecific antibodies can also be used to direct cytotoxic agents to cells which express a particular antigen. These antibodies possess an antigen-binding, arm and an arm which binds a cytotoxic agent or a radionuclide chelator, such as EOTULBE, DPTA, DOTA, or TETA. Another bispecific antibody of interest binds the protein antigen described herein and further binds tissue factor (TF).

[0155] Heteroconjugate Antibodies

[0156] Heteroconjugate, antibodies are also within the scope of the present invention. Heteroconjugate antibodies arc composed of two covalently joined antibodies. Such antibodies have, for example, been proposed to target immune system cells to unwanted cells (U.S. Pat. No. 4.676.980), and for treatment of HIV infection (WO 91/00360; WO 92/200373; EP 03089). It is contemplated that the antibodies can be prepared in vitro using known methods in synthetic protein chemistry, including those involving crosslinking agents. For example, immunotoxins can be constructed using a disulfide exchange reaction or by forming a thioether bond. Examples of suitable reagents for this purpose include iminothiolate and methyl-4-mercaptobutyrimidate and those disclosed, for example, in U.S. Pat. No. 4,676,980.

[0157] Effector Function Engineering

[0158] It can be desirable to modify the antibody of the invention with respect to effector function, so as to enhance, e.g., the effectiveness of the antibody in treating cancer. For example, cysteine residue(s) can be introduced into the Fc region, thereby allowing inter-chain disulfide bond formation in this region. The homodimeric antibody thus generated can have improved internalization capability and/or increased complement-mediated cell killing and antibody-dependent cellular cytotoxicity (ADCC). See Caron et. al., J. Exp. Med., 176: 1191-1195 (1992) and Shopes, J. Immunol., 148: 2918-2922 (1992). Homodimeric antibodies with enhanced anti-tumor activity can also be prepared using heterobifunctional cross-linkers as described in Wolff et. al. Cancer Research, 53: 2560-2565 (1993). Alternatively, an antibody can be engineered that has dual Fc regions and can thereby have enhanced complement lysis and ADCC capabilities. See Stevenson et. al., Anti-Cancer Drug Design, 3: 219-230(1989).

[0159] Immunoconjugates

[0160] The invention also pertains to immunoconjugates comprising an antibody conjugated to a cytotoxic agent such as a chemotherapeutic agent, toxin (e g., an enzymatically active toxin of bacterial, fungal, plant, or animal origin, or fragments thereof), or a radioactive isotope (i.e., a radioconjugate).

[0161] Chemotherapeutic agents useful in the generation of such immunoconjugates have been described above. Enzymatically active toxins and fragments thereof that can be used include diphtheria A chain non binding active fragments of diphtheria toxin, exotoxin A chain (from Pseudomonas aeruginosa), ricin A chain, abrin A chain, modeccin A chain, alpha-sarcin, Aleurites fordii proteins, dianthin proteins, Phytolaca americana proteins (PAPI, PAPII, and PAP-S), momordica charantia inhibitor, curcin, crotin, sapaonaria officinalis inhibitor, gelonin, mitogellin, restriction, phenomycin, enomycin, and the tricothecenes. A variety of radionuclides are available for the production of radioconjugated antibodies. Examples include ²¹²Bi, ¹³¹I, ¹³¹In y⁹⁰Y, and ¹⁸⁶Re.

[0162] Conjugates of the antibody and cytotoxic agent are made using a variety of bifunctional protein-coupling agents Such as N-succinimidyl-3-(2-pyridyldithiol) propionate (SPDP), iminothiolane (IT), bifunctional derivatives of imidoesters (such as dimethyl adipimidate HCL), active esters (such as disuccinimidyl suberate), aldehydes (such as glutareldehyde), bis-azido compounds (such as bis(p-azidobenzoyl)hexanediamine), bis-diazonium derivatives (such as bis-(p-diazoniumbenzoyl)-ethylenediamine), diisocyanates (such as tolyene 2,6-diisocyanate), and bis-active fluorine compounds (such as 1,5-difluoro-2,4-dinitrobenzene). For example, a ricin immunotoxin can be prepared as described in Vitetta et. al., Science, 238: 1098 (1987). Carbon-14-labeled 1-isothiocyanatobenzyl-3-methyldiethylene triaminiepenitaacetic acid (MX-DTPA) is an exemplary chelating agent for conjugation of radionucleotide to the antibody. See W094/11026.

[0163] In another embodiment, the antibody can be conjugated to a “receptor” (Such streptavidin) for utilization in tumor pretargeting wherein the antibody-receptor conjugate is administered to the patient, followed by removal of unbound conjugate from the circulation using a clearing agent and then administration of a “ligand” (e.g., avidin) that is in turn conjugated to a cytotoxic agent.

[0164] Immunoliposomes

[0165] The antibodies disclosed herein can also be formulated as immunoliposomes. Liposomes containing the antibody are prepared by methods known in the art, such as described in Epstein et. al.. Proc. Natl. Acad. Sci. USA, 82: 3688 (1985); Hwang et. al.. Proc. Natl. Acad. Sci. USA, 77: 4030 (1980); and U.S. Pat. Nos. 4,485,045 and 4,544,545. Liposomes with enhanced circulation time are disclosed in U.S. Pat. No. 5.01 3.556.

[0166] Particularly useful liposomes can be generated by the reverse-phase evaporation method faith a lipid composition comprising phosphatidylcholine, cholesterol, and PEG-derivatized phosphatidylethanolamine (PEG-PE). Liposomes are extruded through filters of defined pore size to yield liposomes with the desired diameter. Fab′fragments of the antibody of the present invention can be conjugated to the liposomes as described in Martin et. al., J. Biol. Chem., 257: 286-288 (1982) via a disulfide-interchange reaction. A chemotherapeutic agent (such as Doxorubicin) is optionally contained within the liposome. See Gabizon et. al., J. National Cancer Inst., 81(19): 1484 (1989).

[0167] Diagnostic Applications of Antibodies Directed Against the Proteins of the Invention

[0168] In one embodiment, methods for the screening of antibodies that possess the desired specificity include, but are not limited to, enzyme linked immunosorbent assay (ELISA) and other immunologically mediated techniques known within the art. In a specific embodiment, selection of antibodies that are specific to a particular domain of an NOVX protein is facilitated by generation of hybridomas that bind to the fragment of an NOVX protein possessing such a domain. Thus, antibodies that are specific for a desired domain within an NOVX protein, or derivatives, fragments, analogs or homologs thereof, are also provided herein.

[0169] Antibodies directed against a NOVX protein of the invention may be used in methods known within the art relating to the localization and/or quantitation of a NOVX protein (e.g., for use in measuring levels of the NOVX protein within appropriate physiological samples, for use in diagnostic methods, for use in imaging the protein, and the like). In a given embodiment, antibodies specific to a NOVX protein, or derivative, fragment, analog or homolog thereof, that contain the antibody derived antigen binding domain, are utilized as pharmacologically active compounds (referred to hereinafter as “Therapeutics”).

[0170] An antibody specific for a NOVX protein of the invention (e.g., a monoclonal antibody or a polyclonal antibody) can be used to isolate a NOVX polypeptide by standard techniques, such as immunoaffinity, chromatography or immunoprecipitation. An antibody to a NOVX polypeptide can facilitate the purification of a natural NOVX antigen from cells, or of a recombinantly produced NOVX antigen expressed in host cells. Moreover, such an anti-NOVX antibody can be used to detect the antigenic NOVX protein (e.g., in a cellular lysate or cell supernatant) in order to evaluate the abundance and pattern of expression of the antigenic NOVX protein. Antibodies directed against a NOVX protein can be used diagnostically to monitor protein levels in tissue as part of a clinical testing procedure, e to, for example, determine the efficacy of a given treatment regimen. Detection can be facilitated by coupling (i e.. physically linking) the antibody to a detectable substance. Examples of detectable substances include various enzymes, prosthetic groups, fluorescent materials, luminescent materials, bioluminscent materials, and radioactive materials. Examples of suitable enzymes include horseradish peroxidase, alkaline phosphatase, β-galactosidase, or acetylcholinesterase; examples of suitable prosthetic group complexes include streptavidin/biotin and avidin/biotin: examples of suitable fluorescent materials include unbelliferone, fluorescein, fluorescein isothiocyanate, rhodamine, dichlorotriazinylamine fluorescein, dansyl chloride or phycoerythrin; an example of a luminescent material includes luminol; examples of bioluminscent materials include luciferase, luciferin, and aequorin, and examples of suitable radioactive material include ¹²⁵I, ¹³¹I, ³⁵S or³H.

[0171] Antibody Therapeutics

[0172] Antibodies of the invention, including polyclonal, monoclonal, humanized and fully human antibodies, may used as therapeutic agents. Such agents will generally be employed to treat or prevent a disease or pathology in a subject. An antibody preparation, preferably one having high specificity and high affinity for its target antigen, is administered to the subject and will generally have an effect due to its binding with the target. Such an effect may be one of two kinds, depending on the specific nature of the interaction between the given antibody molecule and the target antigen in question. In the first instance, administration of the antibody may abrogate or inhibit the binding of the target with an endogenous ligand to which it naturally binds. In this case, the antibody binds to the target and masks a binding site of the naturally occurring ligand, wherein the ligand serves as an effector molecule. Thus the receptor mediates a signal transduction pathway for which ligand is responsible.

[0173] Alternatively, the effect may be one in which the antibody elicits a physiological result by virtue of binding to an effector binding site on the target molecule. In this case the target, a receptor having an endogenous ligand which may be absent or defective in the disease or pathology, binds the antibody as a surrogate effector ligand, initiating a receptor-based signal transduction event by the receptor.

[0174] A therapeutically effective amount of an antibody of the invention relates generally to the amount needed to achieve a therapeutic objective. As noted above, this may be a binding interaction between the antibody and its target antigen that, in certain cases interferes with the functioning of the target, and in other cases, promotes a physiological response. The amount required to be administered will furthermore depend on the binding affinity of the antibody for its specific antigen and will also depend on the rate at which an administered antibody is depleted from the free volume other subject to which it is administered. Common ranges from therapeutically effective dosing of an antibody or antibody fragment of the invention may be, by way of nonlimiting example, from about 0.1 mg,/kg body weight to about 50 mg/kg body weight. Common dosing frequencies may range, for example, from twice daily to once a week.

[0175] Pharmaceutical Compositions of Antibodies

[0176] Antibodies specifically binding a protein of the invention, as well as other molecules identified by the screening assays disclosed herein, can be administered for the treatment of various disorders in the form of pharmaceutical compositions. Principles and considerations involved in preparing such compositions, as well as guidance in the choice of components are provided, for example, in Remington: The Science And Practice Of Pharmacy 19th ed. (Alfonso R. Gennaro, et. al., editors) Mack Pub. Co., Easton, Pa.: 1995; Drug Absorption 30 Enhancement: Concepts, Possibilities, Limitations, And Trends, Harwood Academic Publishers, Langhorne, Pa., 1994; and Peptide And Protein Drug Delivery (Advances In Parenteral Sciences, Vol. 4), 1991, M. Dekker, New York.

[0177] If the antigenic protein is intracellular and whole antibodies are used as inhibitors, internalizing antibodies are preferred. However, liposomes can also be used to deliver the antibody, or an antibody fragment, into cells. Where antibody fragments are used, the smallest inhibitory fragment that specifically binds to the binding domain of the target protein is preferred. For example, based upon the variable-region sequences of an antibody, peptide molecules can be designed that retain the ability to bind the target protein sequence. Such peptides can be synthesized chemically and/or produced by recombinant DNA technology. See, e.g., Marasco et. al., Proc. Natl. Acad. Sci. USA, 90: 7889-7893 (1993). The formulation herein can also contain more than one active compound as necessary for the particular indication being treated, preferably those with complementary activities that do not adversely affect each other. Alternatively, or in addition, the composition can comprise an agent that enhances its function, such as, for example, a cytotoxic agent. cytokine, chemotherapeutic agent, or growth-inhibitory agent. Such molecules are suitably present in combination in amounts that are effective for the purpose intended.

[0178] The active ingredients can also be entrapped in microcapsules prepared, for example, by coacervation techniques or by interfacial polymerization, for example, hydroxymethylcellulose or gelatin-microcapsules and poly-(methylmethacrylate) microcapsules, respectively, in colloidal drug delivery systems (for example, liposomes, albumin microspheres, microemulsions, nano-particles, and naniocapsules) or in macroemulsions.

[0179] The formulations to be used for in vivo administration must be sterile. This is readily accomplished by filtration through sterile filtration membranes.

[0180] Sustained-release preparations can be prepared. Suitable examples of sustained-release preparations include semipermeable matrices of solid hydrophobic polymers containing( the antibody, at which matrices are in the form of shaped articles, e.g., films, or microcapsules. Examples of sustained-release matrices include polyesters, hydrogels (for example, poly(2-hydroxymethyl-methacrylate), or poly(vinylalcohol)), polylactides (U.S. Pat. No. 3,773,919), copolymers of L-glutamic acid and γ ethyl-L-glutamate, non-degradable ethylene-vinyl acetate, degradable lactic acid-glycolic acid copolymers such as the LUPRON DEPOT™ (injectable microspheres composed of lactic acid-glycolic acid copolymer and leuprolide acetate), and poly-D-(-)-3-hydroxybutyric acid. While polymers such as ethylene-vinyl acetate and lactic acid-glycolic acid enable release of molecules for over 100 days, certain hydrogels release proteins for shorter time periods.

[0181] ELISA Assay

[0182] An agent for detecting an analyte protein is an antibody capable of binding to an analyte protein, preferably an antibody with a detectable label. Antibodies can be polyclonal, or more preferably, monoclonal. An intact antibody, or a fragment thereof (e.g., F_{ab} or F_{(ab)2}) can be used. The term “labeled”, with regard to the probe or antibody, is intended to encompass direct labeling of the probe or antibody by coupling (i e., physically linking) a detectable substance to the probe or antibody, as well as indirect labeling of the probe or antibody by reactivity with another reagent that is directly labeled. Examples of indirect labelling include detection of a primary antibody using a fluorescently-labeled secondary antibody and end-labeling of a DNA probe with biotin such that it can be detected with fluorescently-labeled streptavidin. The term “biological sample” is intended to include tissues, cells and biological fluids isolated from a subject, as well as tissues, cells and fluids present within a subject. Included within the usage of the term “biological sample”, therefore, is blood and a fraction or component of blood including blood serum, blood plasma, or lymph. That is, the detection method of the invention can be used to detect an analyte mRNA protein, or genomic DNA in a biological sample in vitro as well as in vivo. For example, in vitro techniques for detection of an analyte mRNA include Northern hybridizations and in situ hybridizations. In vitro techniques for detection of all analyte protein include enzyme linked immunosorbent assays (ELISAs), Western blots, immunopecipitations, and immunofluorescence. In vitro techniques for detection of an analyte genomic DNA include Southern hybridizations. Procedures for conducting immunoassays are described. For example in “ELISA: Theory and Practice: Methods in Molecular Biology”, Vol. 42, J. R. Crowther (Ed.) Human Press, Totowa, N.J., 1995; “Immunoassay”, E. Diamandis and T. Christopoulus, Academic Press, Inc., San Diego, Calif., 1996; and “Practice and Theory of Enzyme Immunoassays”, P. Tijssen, Elsevier Science Publishers, Amsterdam, 1985. Furthermore, in vivo techniques for detection of an analyte protein include introducing into a subject a labeled anti-an analyte protein antibody. For example, the antibody can be labeled with a radioactive marker whose presence and location in a subject can be detected by standard imaging techniques.

[0183] NOVX Recombinant Expression Vectors and Host Cells

[0184] Another aspect of the invention pertains to vectors, preferably expression vectors, containing a nucleic acid encoding a NOVX protein, or derivatives, fragments, analogs or homologs thereof. As used herein, the term “vector” refers to a nucleic acid molecule capable of transporting another nucleic acid to which it has been linked. One type of vector is a “plasmid”, which refers to a circular double stranded DNA loop into which additional DNA segments can be ligated. Another type of vector is a viral vector, wherein additional DNA segments can be ligated into the viral genome. Certain vectors are capable of autonomous replication in a host cell into which they are introduced (e.g., bacterial vectors having a bacterial origin of replication and episomal mammalian vectors). Other vectors (e g, non-episomal mammalian vectors) are integrated into the genome of a host cell upon introduction into the host cell, and thereby are replicated along with the host genome. Moreover, certain vectors are capable of directing the expression of genes to which they are operatively-linked. Such vectors are referred to herein as “expression vectors”. In general, expression vectors of utility in recombinant DNA techniques are often in the form of plasmids. In the present specification, “plasmid” and “vector” can be used interchangeably as the plasmid is the most commonly used form of vector. However, the invention is intended to include such other forms of expression vectors, such as viral vectors (e.g., replication defective retroviruses, adenoviruses and adeno-associated viruses) which serve equivalent functions.

[0185] The recombinant expression vectors of the invention comprise a nucleic acid of the invention in a form suitable for expression of the nucleic acid in a host cell, which means that the recombinant expression vectors include one or more regulatory sequences, selected on tile basis of the host cells to be used from expression, that is operatively-linked to the nucleic acid sequence to be expressed. Within a recombinant expression vector, “operably-linked” is intended to mean that the nucleotide sequence of interest is linked to the regulatory sequence(s) in a manner that allows for expression of the nucleotide sequence (e.g., in an in vitro transcription/translation system or in a host cell when the vector is introduced into the host cell).

[0186] The term “regulatory” sequence is intended to includes promoters, enhancers and other expression control elements (e g., polyadenylation signals). Such regulatory sequences are described, for example, in Goeddel, GENE EXPRESSION TECHNOLOGY: METHODS IN ENZYMOLOGY 185, Academic Press, San Diego, Calif. (1990). Regulatory sequences include those that direct constitutive expression of a nucleotide sequence in many types of host cell and those that direct expression of the nucleotide sequence only in certain host cells (e.g., tissue-specific regulatory sequences). It will be appreciated by those skilled in the art that the design of the expression vector can depend on such factors as the choice of the host cell to be transformed, the level of expression of protein desired, etc. The expression vectors of the invention can be introduced into host cells to thereby produce proteins or peptides, including fusion proteins or peptides, encoded by nucleic acids as described herein (e g., NOVX proteins, mutant forms of NOVX proteins, fusion proteins, etc.).

[0187] The recombinant expression vectors of the invention can be designed for expression of NOVX proteins in procaryotic or eucaryotic cells. For example, NOVX proteins can be expressed in bacterial cells such as Escherichia coli, insect cells (using baculovirus expression vectors) yeast cells or mammalian cells. Suitable host cells are discussed further in Goeddel, GENE EXPRESSION TECHNOLOGY: METHODS IN ENZYMOLOGY 185, Academic Press, San Diego, Calif. (1990). Alternatively, the recombinant expression vector can be transcribed and translated vitro, for example using T7 promoter regulatory sequences and T7 polymerase.

[0188] Expression of proteins in prokaryotes is most often carried out in Escherichia coli with vectors containing constitutive or inducible promoters directing the expression of either fusion or non-fusion proteins. Fusion vectors add a number of amino acids to a protein encoded therein, usually to the amino terminus of the recombinant protein. Such fusion vectors typically serve three purposes: (i) to increase expression of recombinant protein: (ii) to increase the solubility of the recombinant protein; and (iii) to aid in the purification of the recombinant protein by acting as a liganicl in affinity purification. Often, in fusion expression vectors, a proteolytic cleavage site is introduced at the junction of the fusion moiety and the recombinant protein to enable separation of the recombinant protein from the fusion moiety subsequent to purification of the fusion protein. Such enzymes, and their cognate recognition sequences, include Factor Xa, thrombin and enterokinase. Typical fusion expression vectors include pGEX (Pharmacia Biotech Inc; Smith and Johnson, 1988, Gene 67: 31-40), pMAL (New England Biolabs, Beverly, Mass.) and pRIT5 (Pharmacia, Piscataway, N.J.) that fuse glutathione S-transferase (GST), maltose E binding protein, or protein A, respectively, to the target recombinant protein.

[0189] Examples of suitable inducible non-fusion E. coli expression vectors include pTrc (Amrann et. Al., (1988) Gene 69:301 -315) and pET 11d (Studier et. al., GENE EXPRESSION TECHNOLOGY: METHODS IN ENZYMOLOGY 185, Academic Press, San Diego, Calif. (1990) 60-89).

[0190] One strategy to maximize recombinant protein expression in E. coli is to express the protein in a host bacteria with an impaired capacity to proteolytically cleave the recombinant protein. See, e.g., Gottesman, GENE EXPRESSION TECHNOLOGY: METHODS IN ENZYMOLOGY 185, Academic Press, San Diego, Calif. (1990) 119-128. Another strategy is to alter the nucleic acid sequence of the nucleic acid to be inserted into an expression vector so that the individual codons for each amino acid are those preferentially utilized in E. coli (.see, e.g., Wada, et. al., 1992. Nucl. Acids Res. 20: 2111-2118). Such alteration of nucleic acid sequences of the invention can be carried out by standard DNA synthesis techniques.

[0191] In another embodiment, the NOVX expression vector is a yeast expression vector. Examples of vectors for expression in yeast Saccharomyces cerevisiae include pYepSec1 (Baldari, et. al., 1987. EMBO. J. 6: 229-234), pMFa (Kurjan and Herskowitz, 1982, Cell 30: 933-943), pJRY88 (Schultz et. al., 1987, Gene 54: 113-123), pYES2 (Invitrogen Corporation, San Diego, Calif.), and picZ (In Vitrogen Corp, San Diego, Calif.).

[0192] Alternatively, NOVX can be expressed in insect cells using baculovirus expression vectors. Baculovirus vectors available for expression of proteins in cultured insect cells (e g., SF9 cells) include the pAc series (Smith, et. al., 1983, Mol. Cell Biol. 3: 2156-2165) and the pVL series (Lucklow and Summers, 1989, Virology 170: 31-39).

[0193] In yet another embodiment, a nucleic acid of the invention is expressed in mammalian cells using a mammalian expression vector. Examples of mammalian expression vectors include pCDM8 (Seed, 1987 Nature 329: 840) and pMT2PC (Kaufman, et/ al., 1987 EMBO. J. 6: 187-195). When used in mammalian cells, the expression vector's control functions are often provided by viral regulatory elements. For example, commonly used promoters are derived from polyoma, adenoviruses 2, cytomegalovirus, and simian virus 40. For other suitable expression systems for both prokaryotic and eukaryotic cells see. e.g., Chapters 16 and 17 of Sambrook, et. al., MOLECULAR CLONING: A LABORATORY MANUAL, 2nd ed., Cold Spring Harbor Laboratory Cold Spring Harbor Laboratory Press, Cold Spring Harbor, N.Y., 1989.

[0194] In another embodiment, the recombinant mammalian expression vector is capable of directing expression of the nucleic acid preferentially in a particular cell type (e g tissue-specific regulatory elements are used to express the nucleic acid). Tissue-specific regulatory elements are known in the art. Non-limiting examples of suitable tissue-specific promoters include the albumin promoter (liver-specific; Pinkert, et. al., 1987. Genes Dev. 1: 268-277), lymphoid-specific promoters (Calame and Eaton, 1988, Adv. Immunol. 43: 235-275), in particular promoters of T cell receptors (Winoto and Baltimore, 1989. EMBO. J. 8: 729-733) and immunoglobulins (Banerji, et. al., 1983, Cell 33: 729-740; Queen and Baltimore, 1983, Cell 33: 741-748), neuron-specific promoters (e.g., the neurofilament promoter; Byrne and Ruddle, 1989, Proc. Natl. Acad. Sci. USA 86: 5473-5477), pancreas-specific promoters (Edlund, et. al., 1985, Science 230: 912-916), and mammary gland-specific promoters (e.g., milk whey promoter; U.S. Pat. No. 4,873,316 and European Application Publication No. 264,166). Developmentally-regulated promoters are also encompassed, e.g, the murine box promoters (Kessel and Gruss, 1990, Science 249: 374-379) and the α-fetoprotein promoter (Campes and Tilghman, 1989, Genes Dev. 3: 537-546).

[0195] The invention further provides a recombinant expression vector comprising a DNA molecule of the invention cloned into the expression vector in an antisense orientation. That is, the DNA molecule is operatively-linked to a regulatory sequence in a manner that allows for expression (by transcription of the DNA molecule) of an RNA molecule that is antisense to NOVX mRNA. Regulatory sequences operatively linked to a nucleic acid cloned in the antisense orientation can be chosen that direct the continuous expression of the antisense RNA molecule in a variety of cell types, for instance viral promoters and/or enhancers, or regulatory sequences can be chosen that direct constitutive, tissue specific or cell type specific expression of antisense RNA. The antisense expression vector can be in the form of a recombinant plasmid, phagemid or attenuated virus in which antisense nucleic acids are produced under the control of a high efficiency regulatory region, the activity of which can be determined by the cell type into which the vector is introduced. For a discussion of the regulation of gene expression using antisense genes see, e.g., Weintraub, et.al., “Antisense RNA as a molecular tool for genetic analysis,” Reviews-Trends in Genetics, Vol. 1(1) 1986.

[0196] Another aspect of the invention pertains to host cells into which a recombinant expression vector of the invention has been introduced. The terms “host cell” and “recombinant host cell” are used inter-changeably herein. It is understood that such terms refer not only to the particular subject cell but also to the progeny or potential progeny of such a cell. Because certain modifications may occur in succeeding generations due to either mutation or environmental influences, such progeny may not, in fact, be identical to the parent cell, but are still included Within the scope of the term as used herein.

[0197] A host cell can be any prokaryotic or eukaryotic cell. For example, NOVX protein can be expressed in bacterial cells such as E. coli, insect cells, yeast or mammalian cells (such as Chinese hamster ovary cells (CHO) or COS cells). Other suitable host cells are known to those skilled in the art.

[0198] Vector DNA can be introduced into prokaryotic or eukaryotic cells via conventional transformation or transfection techniques. As used herein, the terms “transformation” and “transfection” are intended to refer to a variety of art-recognized techniques for introducing foreign nucleic acid (e.g., DNA) into a host cell, including calcium phosphate or calcium chloride co-precipitation, DEAE-dextran-mediated transfection, lipofection, or electroporation. Suitable methods for transforming or transfecting host cells can be found in Sambrook, et. al. (MOLECULAR CLONING: A LABORATORY MANUAL. 2nd ed., Cold Spring Harbor Laboratory, Cold Spring Harbor Laboratory Press, Cold Spring Harbor, N.Y., 1989), and other laboratory manuals.

[0199] For stable transfection of mammalian cells, it is known that, depending upon the expression vector and transfection technique used, only a small fraction of cells may integrate the foreign DNA into their genome. In order to identify and select these integrants, a gene that encodes a selectable marker (e.g., resistance to antibiotics) is generally introduced into the host cells along with the gene of interest. Various selectable markers include those that confer resistance to drugs, such as G418. hygromycin and methotrexate. Nucleic acid encoding a selectable marker can be introduced into a host cell on the same vector as that encoding NOVX or can be introduced on a separate vector. Cells stably transfected with the introduced nucleic acid can be identified by drug selection (e.g., cells that have incorporated the selectable marker will survive, while the other cells die).

[0200] A host cell of the invention, such as a prokaryotic or eukaryotic host cell in culture, can be used to produce (i.e., express) NOVX protein. Accordingly, the invention further provides methods for producing NOVX protein using the host cells of the invention. In one embodiment, the method comprises culturing the host cell of invention (into which a recombinant expression vector encoding NOVX protein has been introduced) in a suitable medium such that NOVX protein is produced. In another embodiment, the method further comprises isolating NOVX protein from the medium or the host cell.

[0201] Transgenic NOVX Animals

[0202] The host cells of the invention can also be used to produce non-limiting transgenic animals. For example, in one embodiment, a host cell of the invention is a fertilized oocyte or an embryonic stem cell into which NOVX protein-coding sequences have been introduced. Such host cells can then be used to create non-human transgenic animals in which exogenous NOVX sequences have been introduced into their genome or homologous recombinant animals in which endogenous NOVX sequences have been altered. Such animals are useful for studying the function and/or activity of NOVX protein and for identifying and/or evaluating modulators of NOVX protein activity. As used herein, a “transgenic animal” is a non-human animal, preferably a mammal, more preferably a rodent such as a rat or mouse, in which one or more of the cells of the animal includes a transgene. Other examples of transgenic animals include non-human primates, sheep, dogs, cows, goats, chickens, amphibians, etc. A transgene is exogenous DNA that is integrated into the genome of a cell from which a transgenic animal develops and that remains in the genome of the mature animal, thereby directing the expression of an encoded gene product in one or more cell types or tissues of the transgenic animal. As used herein, a “homologous recombinant animal” is a non-human animal, preferably a mammal, more preferably a mouse, in which an endogenous NOVX gene has been altered by homologous recombination between the endogenous gene and an exogenous DNA molecule introduced into a cell of the animal, e.g., an embryonic cell of the animal, prior to development of the animal.

[0203] A transgenic animal of the invention can be created by introducing NOVX-encoding nucleic acid into the male pronuclei of a fertilized oocyte (e.g., by microinjection, retroviral infection) and allowing the oocyte to develop in a pseudopregnant female foster animal. The human NOVX cDNA sequences, i e., any one of SEQ ID NO: 2n−1, wherein n is an integer between 1 and 88, can be introduced as a transgene into the genome of a non-human animal. Alternatively, a non-human homologue of the human NOVX gene, such as a mouse NOVX genie, can be isolated based on hybridization to the human NOVX cDNA (described further supra) and used as a transgene. Intronic sequences and polyadenylation signals can also be included in the transgene to increase the efficiency or expression of the transgenic. A tissue-specific regulatory sequence(S) can be operably-linked to the NOVX transgene to direct expression of NOVX protein to particular cells. Methods for generating transgenic animals via embryo manipulation and microinjection, particularly animals such as mice, have become conventional in the art and are described, for example, in U.S. PAT. Nos. 4,736,866: 4,870,009; and 4,873,191; and Hogan, 1986. In: MANIPULATING the MOUSE EMBRYO, Cold Spring Harbor Laboratory Press, Cold Spring Harbor. N.Y. Similar methods are used for production of other transgenic animals. A transgenic founder animal can be identified based upon the presence of the NOVX transgenic in its genome and/or expression of NOVX mRNA in tissues or cells of the animals. A transgenic founder animal can then be used to breed additional animals carrying the transgene. Moreover, transgenic animals carrying a transgene-encoding NOVX protein can further be bred to other transgenic animals carrying transgenes.

[0204] To create a homologous recombinant animal, a vector is prepared which contains at least a portion of a NOVX gene into which a deletion, addition or substitution has been introduced to thereby alter, e.g, functionally disrupt, the NOVX gene. The NOVX gene can be a human gene (e.g., the cDNA of any one of SEQ ID NO: 2n−1, wherein n is an integer between 1 and 88), but more preferably, is a non-human homologue of a human NOVX gene. For example, a mouse homologue of human NOVX gene of SEQ ID NO: 2n−1, wherein n is an integer between 1 and 88, can be used to construct a homologous recombination vector suitable for altering an endogenous NOVX gene in the mouse genome. In one embodiment, vector is designed such that, upon homologous recombination, the endogenous NOVX gene is functionally disrupted (i.e., no longer encodes a functional protein; also referred to as a “knock out” vector).

[0205] Alternatively, the vector can be designed such that, upon homologous recombination, the endogenous NOVX gene is mutated or otherwise altered but still encodes functional protein (e.g., the upstream regulatory region can be altered to thereby alter the expression of the endogenous NOVX protein). In the homologous recombination vector, the altered portion of the NOVX genie is flanked at its 5′- and 3′-termini by additional nucleic acid of the NOVX gene to allow for homologous recombination to occur between the exogenous NOVX gene carried by the vector and an endogenous NOVX gene in an embryonic stem cell. The additional flanking NOVX nucleic acid is of sufficient length for successful homologous recombination with the endogenous gene. Typically, several kilobases of flanking DNA (both at the 5′- and 3′-termini) are included in the vector. See, e.g., Thomas et. al., 1987. Cell 51: 503 for a description of homologous recombination vectors. The vector is ten introduced into an embryonic stem cell line (e.g., by electroporation) and cells in which the introduced NOVX gene has homologously-recombined with the endogenous NOVX gene are selected. See, eg., Li, et. al., 1992, Cell 69: 915.

[0206] The selected cells are then injected into a blastocyst of an animal (e.g., a mouse) to form aggregation chimeras. See, e.g. Bradley, 1987. In: TERATORCARCINOMAS AND EMBRYONIC STEM CELLS: A PRACTICAL APPROACH, Robertson, ed. IRL, Oxford, pp. 113-152. A chimeric embryo can then be implanted into a suitable pseudopregnant female foster animal and the embryo brought to term. Progeny harboring the homologously-recombined DNA in their germ cells can be used to breed animals in which all cells of the animal contain the homologously-recombined DNA by germline transmission of the transgene. Methods for constructing homologous recombination vectors and homologous recombinant animals are described further in Bradley, 1991, Curr. Opin. Biotechnol. 2: 823-829; PCT International Publication Nos.: WO 90/1 1354; WO 91/01140; WO 92/0968; and WO 93/04169.

[0207] In another embodiment, transgenic non-humans animals can be produced that contain selected systems that allow for regulated expression of the transgene. One example of such a system is the cre/loxP recombining system of bacteriophage P1. For a description of the cre/loxP recombining system, See, e.g., Lakso, et. al., 1992, Proc. Natl. Acad. Sci. USA 89: 6232-6236. Another example of a recombinase system is the FLP recombinase system of Saccharomyces cerevisiae. See, O'Gorman, et. al., 1991, Science 251:1351-1355. If a cre/loxP recombinase system is used to regulate expression of the transgene, animals containing transgenes encoding both the Cre recombinase and a selected protein are required. Such animals can be provided through the construction of “double” transgenic animals, e.g., by mating two transgenic animals, one containing a transgene encoding a selected protein and the other containing a transgene encoding a recombinase.

[0208] Clones of the non-human transgenic animals described herein can also be produced according-J to the methods described in Wilmutt, et. al., 1997, Nature 385: 810-813. In brief, a cell (e.g., a somatic cell) from the transgenic animal can be isolated and induced to exit the (growth cycle and enter G₀ phase. The quiescent cell can then be fused, e.g., through the use of electrical pulses, to an enucleated oocyte from an animal of the same species from Which the quiescent cell is isolated. The reconstructed oocyte is then cultured such that it develops to morula or blastocyte and then transferred to pseudopregnant female foster animal. The offspring borne of this female foster animal will be a clone of the animal from Which the cell (e.g., the somatic cell) is isolated.

[0209] Pharmaceutical Compositions

[0210] The NOVX nucleic acid molecules, NOVX proteins, and anti-NOVX antibodies (also referred to herein as “active compounds”) of the invention, and derivatives, fragments, analogs and homologs thereof, can be incorporated into pharmaceutical compositions suitable for administration. Such compositions typically comprise the nucleic acid molecule, protein, or antibody and a pharmaceutically acceptable carrier. As used herein, “pharmaceutically acceptable carrier” is intended to include any and all solvents, dispersion media, coatings, antibacterial and antifungal agents, isotonic and absorption delaying agents, and the like, compatible with pharmaceutical administration. Suitable carriers are described in the most recent edition of Remington's Pharmaceutical Sciences, a standard reference text in the field, which is incorporated herein by reference. Preferred examples of Such carriers or diluents include, but are not limited to, water, saline, finger's solutions, dextrose solution, and ⁵% human serum albumin. Liposomes and non-aqueous vehicles such as fixed oils may also be used. The use of such media and agents for pharmaceutically active substances is well known in the art. Except insofar as any conventional media or agent is incompatible with the active compound, use thereof in the compositions is contemplated. Supplementary active compounds can also be incorporated into the compositions.

[0211] A pharmaceutical composition of the invention is formulated to be compatible with its intended route of administration. Examples of routes of administration include parenteral, e.g., intravenous, intradermal, subcutaneous, oral (e.g., inhalation), transdermal (i.e., topical), transmucosal, and rectal administration. Solutions or suspensions used for parenteral, intradermal, or subcutaneous application can include the following components: a sterile diluent such as water for injection, saline solution, fixed oils, polyethylene glycols, glycerine, propylene glycol or other synthetic solvents; antibacterial agents such as benzyl alcohol or methyl parabens; antioxidants such as ascorbic acid or sodium bisulfite; chelating agents Such as ethylenediaminetetraacetic acid (EDA); buffers such as acetates, citrates or phosphates, and agents for the ad adjustment of tonicity such as sodium chloride or dextrose. The pH can be adjusted with acids or bases, such as hydrochloric acid or sodium hydroxide. The parenteral preparation can be enclosed in ampoules, disposable syringes or multiple dose vials made of glass or plastic.

[0212] Pharmaceutical compositions suitable for injectable use include sterile aqueous solutions (where water soluble) or dispersions and sterile powders for the extemporaneous preparation of sterile injectable solutions or dispersion. For intravenous administration, suitable carriers include physiological saline, bacteriostatic water, Cremophor El ∩ (BASF. Parsippany,. N.J.) or phosphate buffered saline (PBS). In all cases, the composition must be sterile and should be fluid to the extent that easy syringeability exists. It must be stable under the conditions of manufacture and storage and must be preserved against the contaminating action of micro such as bacteria and fungi. The carrier can be a solvent or dispersion medium containing, for example, water, ethanol, polyol (for example, glycerol, propylene glycol, and liquid polyethylene glycol, and the like), and suitable mixtures thereof. The proper fluidity can be maintained, for example, by the use of a coating such as lecithin, by the maintenance of the required particle size in the case of dispersion and by the use of surfactants. Prevention of the action of microorganisms can be achieved by various antibacterial and antifungal agents, for example, parabens, chlorobutanol, phenol, ascorbic acid, thimerosal, and the like. In many cases, it will be preferable to include isotonic agents, for example, sugars, polyalcohols such as mannitol, sorbitol, sodium chloride in the composition. Prolonged absorption of the injectable compositions can be brought about by including in the composition an agent which delays absorption, for example, aluminum monostearate and gelatin.

[0213] Sterile injectable solutions can be prepared by incorporating the active compound (e.g, a NOVX protein or anti-NOVX antibody) in the required amount in an appropriate solvent with one or a combination of ingredients enumerated above, as required, followed by filtered sterilization. Generally, dispersions are prepared by incorporating the active compound into a sterile vehicle that contains a basic dispersion medium and the required other ingredients from those enumerated above. In the case of sterile powders for the preparation of sterile injectable solutions, methods of preparation are vacuum drying and freeze-drying that yields a powder of the active ingredient plus any additional desired ingredient from a previously sterile-filtered solution thereof.

[0214] Oral compositions generally include an inert diluent or an edible carrier. They can be enclosed in gelatin capsules or compressed into tablets. For the purpose of oral therapeutic administration the active compound can be incorporated with excipients and used in the form of tablets, troches, or capsules. Oral compositions can also be prepared using a fluid carrier for use as a mouthwash, wherein the compound in the fluid carrier is applied orally and swished and expectorated or swallowed. Pharmaceutically compatible binding agents, and/or adjuvant materials can be included as part of the composition. The tablets, pills, capsules, troches and the like can contain any of the following ingredients, or compounds of a similar nature: a binder such as microcrystalline cellulose, gum tragacanth or gelatin an excipient such as starch or lactose, a disintegrating agent such as alginic acid, Primogel, or corn starch: a lubricant such as magnesium stearate or Sterotes, a glidant such as colloidal silicon dioxide; a sweetening agent such as sucrose or saccharin; or a flavoring agent such as peppermint, methyl salicylate, or orange flavoring.

[0215] For administration by inhalation., the compounds are delivered in the form of an aerosol spray from pressured container or dispenser which contains a suitable propellant. e.g., a gas as such as carbon dioxide, or a nebulizer.

[0216] Systemic administration can also be by transmucosal or transdermal means. For transmucosal or transdermal administration, penetrants appropriate to the barrier to be permeated are used in the formulation. Such penetrants are generally known in the art, and include, for example, for transmucosal administration, detergents, bile salts, and fusidic acid derivatives. Transmucosal administration can be accomplished through the use of nasal sprays or suppositories. For transdermal administration, the active compounds are formulated into ointments, salves, gels, or creams as generally known in the art.

[0217] The compounds can also be prepared in the form of suppositories (e.g with conventional suppository bases Such as cocoa butter and other glycerides) or retention enemas for rectal delivery.

[0218] In one embodiment, the active compounds are prepared with carriers that will protect the compound against rapid elimination from the body, such as a controlled release formulation, including implants and microencapsulated delivery systems. Biodegradable, biocompatible polymers can be used, such as ethylene vinyl acetate, polyanhydrides, polyglycolic acid, collagen, polyorthoesters, and polylactic acid. Methods for preparation of such formulations will be apparent to those skilled in the art. The materials can also be obtained commercially from Alza Corporation and Nova Pharmaceuticals, Inc. Liposomal suspensions (including liposomes targeted to infected cells with monoclonal antibodies to viral antigens) can also be used as pharmaceutically acceptable carriers. These can be prepared according to methods known to those skilled in the art, for example, as described in U.S. Pat. No. 4,522,811.

[0219] It is especially advantageous to formulate oral or parenteral compositions in dosage unit form for ease of administration and uniformity of dosage. Dosage unit form as used herein refers to physically discrete units suited as unitary dosages for the subject to be treated; each unit containing, a predetermined quantity of active compound calculated to produce the desired therapeutic effect in association with the required pharmaceutical carrier. The specification for the dosage unit forms of the invention are dictated by and directly dependent on the unique characteristics of tie active compound and the particular therapeutic effect to be achieved, and the limitations inherent in the art of compounding Such an active compound for the treatment of individuals.

[0220] The nucleic acid molecules of the invention can be inserted into vectors and used as gene therapy vectors. Gene therapy vectors can be delivered to a subject by, for example, intravenous injection, local administration (See, e g., U.S. Pat. No. 5,328,470) or by stereotatic injection (see, e.g., Chen, et al., 1994, Proc. Natl. Acad. Sci. USA 91: 3054-3057). The pharmaceutical preparation of the gene therapy vector can include the gene therapy vector in an acceptable diluent, or can comprise a slow release matrix in which the gene delivery vehicle is imbedded. Alternatively, where the complete gene delivery vector can be produced intact from recombinant cells, e.g., retroviral vectors, the pharmaceutical preparation can include one or more cells that produce the gene delivery system.

[0221] The pharmaceutical compositions can be included in a container, pack, or dispenser together with instructions for administration.

[0222] Screening and Detection Methods

[0223] The isolated nucleic acid molecules of the invention can be used to express NOVX protein (e.g., via a recombinant expression vector in a host cell in gene therapy applications), to detect NOVX mRNA (e.g., in a biological sample) or a genetic lesion in a NOVX gene, and to modulate NOVX activity, as described further, below. In addition, the NOVX proteins can be used to screen drugs or compounds that modulate the NOVX protein activity or expression as well as to treat disorders characterized by insufficient or excessive production of NOVX protein or production of NOVX protein forms that have decreased or aberrant activity compared to NOVX wild-type protein (e.g.; diabetes (regulates insulin release); obesity (binds and transport lipids); metabolic disturbances associated with obesity, the metabolic syndrome X as well as anorexia and wasting disorders associated with chronic diseases and various cancers, and infectious disease (possesses anti-microbial activity) and the various dyslipidemias. In addition, the anti-NOVX antibodies of the invention can be used to detect and isolate NOVX proteins and modulate NOVX activity. In yet a further aspect, the invention can be used in methods to influence appetite, absorption of nutrients and the disposition of metabolic substrates in both a positive and negative fashion.

[0224] The invention further pertains to novel agents identified by the screeching) assays described herein and uses thereof for treatments as described, supra.

[0225] Screening Assays

[0226] The invention provides a method (also referred to herein as a “screening assay”) for identifying, modulators, i.e., candidate or test compounds or agents (e.g., peptides, peptidomimetics, small molecules or other drugs) that bind to NOVX proteins or have a stimulatory or inhibitory effect on, e.g., NOVX protein expression or NOVX protein activity. The invention also includes compounds identified in the screening assays described herein.

[0227] In one embodiment, the invention provides assays for screening candidate or test compounds which bind to or modulate the activity of the membrane-bound form of a NOVX protein or polypeptide or biologically-active portion thereof. The test compounds of the invention can be obtained using any of the numerous approaches in combinatorial library methods known in the art, including: biological libraries; spatially addressable parallel solid phase or solution phase libraries; synthetic library methods requiring deconvolution; the “one-bead one-compound” library method; and synthetic library methods using affinity chromatography selection. The biological library approach is limited to peptide libraries, while the other four approaches are applicable to peptide, non-peptide oligomer or small molecule libraries of compounds. See, e.g., Lam, 1997, Anticancer Drug Design 12: 145.

[0228] A “small molecule” as used herein, is meant to refer to a composition that has a molecular weight of less than about 5 kD and most preferably less than about 4 kD. Small molecules can be, e.g., nucleic acids, peptides, polypeptides, peptidomimetics, carbohydrates, lipids or other organic or inorganic molecules. Libraries of chemical and/or biological mixtures, such as fungal, bacterial, or algal extracts, are known in the art and can be screened with any of the assays of the invention.

[0229] Examples of methods for the synthesis of molecular libraries can be found in the art, for example in: DeWitt, et. al., 1993, Proc. Natl. Acad. Sci, U.S.A. 90: 6909; Erb, et. al., 1994, Proc. Natl. Acad. Sci. USA 91: 11422; Zuckermann, et. al., 1994, J. Med. Chem. 37: 2678; Cho, et. al., 1993. Science 261: 1303; Carrell, et. al., 1994, Angew. Chem. Ed. Engl. 33:

[0230] 2059; Carell, et al., 1994, Angew Chem. Ed. Engl. 33: 2061; and Gallop, et. al., 1994, J. Med. Chem. 37: 1233.

[0231] Libraries of compounds may be presented in solution (e.g., Houghten, 1992, Biotechniques 13: 412-421), or on beads (Lam. 1991, Nature 354: 82-84), on chips (Foder, 1993, Nature 364: 555-556), bacteria (Ladner, U.S. Pat. No. 53,22,409), spores (Ladner, U.S. Pat. No. 5,233,409), plasmids (Cull, et. al., 1992, Proc. Natl. Acad. Sci. USA 89: 1865-1869) or on phage (Scott and Smith, 1990, Science 249: 386-390; Devlin, 1990, Science 20 249: 404-406; Cwirla, et. al., 1990, Proc. Natl. Acad. Sci. USA. 87: 6378-6382; Felici, 1991. J. Mol. Biol. 222: 301-310; Ladner, U.S. Pat. No. 5,233,409.).

[0232] In one embodiment, an assay is a cell-based assay in herein, a cell which expresses a membrane-bound form of NOVX protein, or a biologically-active portion thereof, on the cell surface is contacted with a test compound and the ability of the test compound to bind to a NOVX protein determined. The cell, for example, can of mammalian origin or a yeast cell. Determining the ability of the test compound to bind to the NOVX protein can be accomplished, for example, by coupling the test compound with a radioisotope or enzymatic label such that binding of the test compound to the NOVX protein or biologically-active portion thereof can be determined by detecting the labeled compound in a complex. For example, test compounds can be labeled with ¹²⁵I, ³⁵S, ¹⁴C, or ³H, either directly or indirectly, and the radioisotope detected by direct counting of radioemission or by scintillation counting. Alternatively, test compounds can be enzymatically-labeled with, for example, horseradish peroxidase, alkaline phosphatase, or luciferase, and the enzymatic label detected by determination of conversion of an appropriate substrate to product. In one embodiment, the assay comprises contacting a cell which expresses a membrane-bound form of NOVX protein, or a biologically-active portion thereof, on the cell surface with a known compound which binds NOVX to form an assay mixture, contacting the assay mixture with a test compound, and determining the ability of the test compound to interact with a NOVX protein, wherein determining the ability of the test compound to interact with a NOVX protein comprises determining the ability of the test compound to preferentially bind to NOVX protein or a biologically-active portion thereof as compared to the known compound.

[0233] In another embodiment, an assay is a cell-based assay comprising contacting a cell expressing a membrane-bound form of NOVX protein, or a biologically-active portion thereof, on the cell surface with a test compound and determining the ability of the test compound to modulate (e.g., stimulate or inhibit) the activity of the NOVX protein or biologically-active portion thereof. Determining the ability of the test compound to modulate the activity of NOVX or a biologically-active portion thereof call be accomplished, for example, by determining the ability of the NOVX protein to bind to or interact with a NOVX target molecule. As used herein, a “target molecule” is a molecule with which a NOVX protein binds or interacts in nature, for example a molecule on the surface of a cell which expresses a NOVX interacting protein a molecule on the Surface of a second cell, a molecule in the extracellular milieu, a molecule associated with the internal surface of a cell membrane or a cytoplasmic molecule. A NOVX target molecule call be a non-NOVX molecule or a NOVX protein or polypeptide of the invention. In one embodiment, a NOVX target molecule is a component of a signal transduction pathway that facilitates transduction of an extracellular signal (e.g., a signal generated by binding of a compound to a membrane-bound NOVX molecule) through,h the cell membrane and into the cell. The target, for example, call be a second intercellular protein that has catalytic activity or a protein that facilitates the association of downstream signaling, molecules With NOVX.

[0234] Determining the ability of the NOVX protein to bind to or interact with a NOVX target molecule can be accomplished by one of the methods described above for determining direct binding. In one embodiment, determining the ability of the NOVX protein to bind to or interact with a NOVX target molecule can be accomplished by determining the activity of the target molecule. For example, the activity of the target molecule can be determined by detecting induction of a cellular second messenger of the target (i.e. intracellular Ca²⁺, diacylglycerol, IP₃, etc.), detecting catalytic/enzymatic activity of the target an appropriate substrate, detecting the induction of a reporter gene (comprising a NOVX-responsive regulatory element operatively linked to a nucleic acid encoding a detectable marker, e.g., luciferase), or detecting a cellular response, for example, cell survival, cellular differentiation, or cell proliferation.

[0235] In yet another embodiment, an assay of the invention is a cell-free assay comprising contacting a NOVX protein or biologically-active portion thereof with a test compound and determining the ability of the test compound to bind to the NOVX protein or biologically-active portion thereof. Binding of the test compound to the NOVX protein can be determined either directly or indirectly as described above. In one Such embodiment, the assay comprises contacting the NOVX protein or biologically-active portion thereof with a known compound which binds NOVX to form an assay mixture contacting the assay mixture with a test compound, and determining, the ability of the test compound to interact with a NOVX protein, wherein determining the ability of the test compound to interact with a NOVX protein comprises determining the ability of the test compound to preferentially bind to NOVX or biologically-active portion thereof as compared to the known compound.

[0236] In still another embodiment, an assay is a cell-free assay comprising contacting NOVX protein or biologically-active portion thereof with a test compound and determining( the ability of the test compound to modulate (e.g. stimulate or inhibit) the activity of the NOVX protein or biologically-active portion thereof. Determining the ability of the test compound to modulate the activity of NOVX can be accomplished, for example, by determining the ability of the NOVX protein to bind to a NOVX target molecule by one of the methods described above for determining direct biding in an alternative embodiment, determining the ability of the test compound to modulate the activity of NOVX protein can be accomplished by determining the ability of the NOVX protein further modulate a NOVX target molecule. For example, the catalytic/enzymatic activity of the target molecule on an appropriate Substrate call be determined as described, supra.

[0237] In yet another embodiment, the cell-free assay comprises contacting the NOVX protein or biologically-active portion thereof with a known compound which binds NOVX protein to form an assay mixture, contacting the assay mixture with a test compound, and determining the ability of the test compound to interact with a NOVX protein, wherein determining the ability of the test compound to interact with a NOVX protein comprises determining the ability of the NOVX protein to preferentially bind to or modulate the activity of a NOVX target molecule.

[0238] The cell-free assays of the invention are amenable to use of both the soluble form or the membrane-bound form of NOVX protein. In the case of cell-free assays comprising the membrane-bound form of NOVX protein, it may be desirable to utilize a solubilizing agent such that the membrane-bound form of NOVX protein is maintained in solution. Examples of such solubilizing agents include non-ionic detergents such as n-octylglucoside, n-dodecylglucoside, n-dodecylmaltoside, octanoyl-N-methylglucamide, decanoyl-N-methylglucamide, Triton® X-100, Triton® X-114,Thesit®, Isotridecypoly(ethylene glycol ether)ₙ, N-dodecyl-N,N-dimethyl-3-ammonio-1-propane sulfonate, 3-(3-cholamidopropyl)dimethylamminiol-1-propane sulfonate (CHAPS), or 3-(3-cholamidopropyl)dimethylamminiol-2-hydroxy-1-propane sulfonate (CHAPSO).

[0239] In more than one embodiment of the above assay methods of the invention, it may be desirable to immobilize either NOVX protein or its target molecule to facilitate separation of complexed from uncomplexed forms of one or both of the proteins, as well as to accommodate automation of the assay. Binding of a test compound to NOVX protein, or interaction of NOVX protein with a target molecule in the presence and absence of a candidate compound, can be accomplished in any vessel suitable for containing the reactants. Examples of such vessels include microtiter- plates, test tubes, and micro-centrifuge tubes. In one embodiment, a fusion protein can be provided that adds a domain that allows one or both of the proteins to be bound to a matrix. For example. GST-NOVX fusion proteins or GST-target fusion proteins can be adsorbed onto glutathione sepharose beads (Sigma Chemical, St. Louis, Mo.) or glutathione derivatized microtiter plates, that are then combined with the test compound or the test compound and either the non-adsorbed target protein or NOVX protein and the mixture is incubated under conditions conducive to complex formation (e.,g., at physiological conditions for salt and pH). Following incubation the beads or microtiter plate wells are washed to remove any unbound components, the matrix immobilized in the case of beads, complex determined either directly or indirectly, for example, as described, supra. Alternatively, the complexes can be dissociated from the matrix, and the level of NOVX protein binding or activity determined using standard techniques.

[0240] Other techniques for immobilizing proteins on matrices can also be used in the screening, assays of the invention. For example, either the NOVX protein or its target molecule can be immobilized utilizing conjugation of biotin and streptavidin. Biotinylated NOVX protein or target molecules can be prepared from biotin-NHS (N-hydroxy-succinimide) using techniques well-known within the art (e.g., biotinylation kit, Pierce Chemicals, Rockford, Ill.), and immobilized in the wells of streptavidin-coated 96 well plates (Pierce Chemical). Alternatively, antibodies reactive with NOVX protein or target molecules, but which do not interfere with binding of the NOVX protein to its target molecule, can be derivatized to the wells of the plate, and unbound target or NOVX protein trapped in the wells by antibody conjugation. Methods for detecting such complexes, in addition to those described above for the GST-immobilized complexes, include immunodetection of complexes using antibodies reactive with the NOVX protein or target molecule, as well as enzyme-linked assays that rely on detecting an enzymatic activity associated with the NOVX protein or target molecule.

[0241] In another embodiment, modulators of NOVX protein expression are identified in a method wherein a cell is contacted with a candidate compound and the expression of NOVX mRNA or protein in the cell is determined. The level of expression of NOVX mRNA or protein in the presence of the candidate compound is compared to the level of expression of NOVX mRNA or protein in the absence of the candidate compound. The candidate compound can then be identified as a modulator of NOVX mRNA or protein expression based upon this comparison. For example, when expression of NOVX mRNA or protein is greater (i.e. statistically significantly greater) in the presence of the candidate compound than in its absence, the candidate compound is identified as a stimulator of NOVX m1RNA or protein expression. Alternatively, when expression of NOVX mRNA or protein is less (statistically significantly less) in the presence of the candidate compound than in its absence, the candidate compound is identified as an inhibitor of NOVX mRNA or protein expression.

[0242] The level of NOVX mRNA or protein expression in the cells can be determined by methods described herein for detecting( NOVX mRNA or protein.

[0243] In yet another aspect of the invention, the NOVX proteins can be used as “bait proteins” in a two-hybrid assay or three hybrid assay (see, e.g., U.S. Pat. No. 5,283,317; Zervos, et. al., 1993, Cell 72: 223-232; Madura, et. al., 1993, J. Biol. Chem. 268: 12046-12054; Bartel, et. al., 1993, Biotechniques 14: 920-924; Iwabuchi, et. at., 1993, Oncogene 8: 1693-1696; and Brent WO 94/10300), to identify other proteins that bind to or interact with NOVX (“NOVX-binding proteins” or “NOVX-bp”) and modulate NOVX activity. Such NOVX-binding proteins are also involved in the propagation of signals by the NOVX proteins as, for example, upstream or downstream elements of the NOVX pathway.

[0244] The two-hybrid system is based on the modular nature of most transcription factors, which consist of separable DNA-binding and activation domains. Briefly, the assay utilizes two different DNA constructs. In one construct, the gene that codes for NOVX is fused to a gene encoding the DNA binding domain of a known transcription factor (e.g., GAL-4). In the other construct, a DNA sequence, from a library of DNA sequences, that encodes an unidentified protein (“prey” or “sample”) is fused to a gene that codes for the activation domain of the known transcription factor. If the “bait” and the “prey” proteins are able to interact, in vivo, forming a NOVX-dependent complex, the DNA-binding and activation domains of the transcription factor are brought into close proximity. This proximity allows transcription of a reporter gene (e.g., LacZ) that is operably linked to a transcriptional regulatory site responsive to the transcription factor. Expression of the reporter gene can be detected and cell colonies containing the functional transcription factor can be isolated and used to obtain the cloned gene that encodes the protein which interacts with NOVX.

[0245] The invention further pertains to novel agents identified by the aforementioned screening assays and uses thereof for treatments as described herein.

[0246] Detection Assays

[0247] Portions or fragments of the cDNA sequences identified herein (and the corresponding complete gene sequences) can be used in numerous ways as polynucleotide reagents. By way of example, and not of limitation, these sequences can be used to: (i) map their respective genes on a chromosome; and, thus, locate gene regions associated with genetic disease; (ii) identify an individual loom a minute biological sample (tissue typing,); and (iii) aid in forensic identification of a biological sample. Some of these applications are described in the subsections, below.

[0248] Chromosome Mapping

[0249] Once the sequence (or a portion of the sequences) of a gene has been isolated, this sequence can be used to map the location of the gene on a chromosome. This process is called chromosome mapping. Accordingly, portions or fragments of the NOVX sequences of SEQ ID NO: 2n−1, wherein, is an integer between 1 and 88, or fragments or derivatives thereof, can be used to map the location of the NOVX genes, respectively, on a chromosome. The mapping of the NOVX sequences to chromosomes is an important first step in correlating these sequences with (genes associated with disease.

[0250] Briefly, NOVX genes can be mapped to chromosomes by preparing PCR primers (preferably 15-25 bp in length) from the NOVX sequences. Computer analysis of the NOVX, sequences can be used to rapidly select primers that do not span more than one exon in the genomic DNA, thus complicating the amplification process. These primers can then be used for PCR screening of somatic cell hybrids containing individual human chromosomes. Only those hybrids containing the human gene corresponding to the NOVX sequences will yield an amplified fragment.

[0251] Somatic cell hybrids are prepared by fusing somatic cells from different mammals (e.g., human and mouse cells). As hybrids of human and mouse cells grow and divide, they gradually lose human chromosomes in random order, but retain the mouse chromosomes. By using media in which mouse cells cannot grow, because they lack a particular enzyme, but in which human cells can, the one human chromosome that contains the gene encoding the needed enzyme will be retained. By using various media, panels of hybrid cell lines can be established. Each cell line in a panel contains either a single human chromosome or a small number of human chromosomes, and a full set of mouse chromosomes, allowing easy mapping of individual genes to specific human chromosomes. See, e.g., D'Eustachio, et. al., 1983, Science 220: 919-924. Somatic cell hybrids containing only fragments of human chromosomes can also be produced by using human chromosomes with translocations and deletions.

[0252] PCR mapping of somatic cell hybrids is a rapid procedure for assigning a particular sequence to a particular chromosome. Three or more sequences can be assigned per day using a single thermal cycle. Using, the NOVX sequences to design oligonucleotide primers, sub-localization can be achieved with panels of fragments from specific chromosomes.

[0253] Fluorescence in situ hybridization (FISH) of a DNA sequence to a metaphase chromosomal spread can further be used to provide a precise chromosomal location in one step. Chromosome spreads can be made using, cells whose division has been blocked in metaphase by a chemical like colcemid that disrupts the mitotic spindle. The chromosomes can be treated briefly with trypsin, and then stained with Giemsa. A pattern of light and dark bands develops on each chromosome, so that the chromosomes can be identified individually. The FISH technique can be used with a DNA sequence as short as 500 or 600 bases. However, clones larger than 1,000 bases have a higher likelihood of binding to a unique chromosomal location with sufficient signal intensity for simple detection. Preferably 1,000 bases, and more preferably 2,000 bases, ill suffice to get good results at a reasonable amount of time. For a review of this technique, see, Verma, et. al. HUMAN CHROMOSOMES: A MANUAL OF BASIC TECHNIQUES (Pergamon Press, New York 1988).

[0254] Reagents for chromosome mapping can be used individually to mark a single chromosome or a single site on that chromosome, or panels of reagents can be used for marking multiple sites and/or multiple chromosomes. Reagents corresponding to noncoding regions of the genes actually are preferred for mapping purposes. Coding sequences are more likely to be conserved within gene families, thus increasing the chance of cross hybridizations during chromosomal mapping.

[0255] Once a sequence has been mapped to a precise chromosomal location, the physical position of the sequence on the chromosome can be correlated with genetic map data. Such data are found, e.g., in McKusick, MENDELIAN INHERITANCE IN MAN, available on-line through Johns Hopkins University Welch Medical Library). The relationship between genes and disease, mapped to the same chromosomal region, can then be identified through linkage analysis (co-inheritance of physically adjacent genes), described in, e.g., Egeland, et. al., 1987, Nature 325: 783-787.

[0256] Moreover, differences in the DNA sequences between individuals affected and unaffected with a disease associated with the NOVX gene, can be determined. If a mutation is observed in some or all of the affected individuals but not in any unaffected individuals, then the mutation is likely to be the causative agent of the particular disease. Comparison of affected and unaffected individuals generally involves first looking for structural alterations in the chromosomes, such as deletions or translocations that are visible from chromosome spreads or detectable using PCR based on that DNA sequence. Ultimately, complete sequencing of genes from several individuals can be performed to confirm the presence of a mutation and to distinguish mutilations from polymorphisms.

[0257] Tissue Typing

[0258] The NOVX sequences or the invention can also be used to identify individuals from minute biological samples. In this technique, an individual's genomic DNA is digested with one or more restriction enzymes, and probed on a Southern blot to yield unique bands for identification. The sequences of the invention are useful as additional DNA markers for RFLP (restriction ligament length polymorphisms, described in U.S. Pat. No. 5,272,057).

[0259] Furthermore, the sequences of the invention can be used to provide an alternative technique that determines the actual base-by-base DNA sequence of selected portions of an individual's genome. Thus, the NOVX sequences described herein can be used to prepare two PCR primers from the 5′- and 3′-termini of the sequences. These primers can then be used to amplify an individual's DNA and subsequently sequence it.

[0260] Panels of corresponding DNA sequences from individuals, prepared in this manner, can provide unique individual identifications, as each individual will have a unique set of such DNA sequences due to allelic differences. The sequences of the invention can be used to obtain such identification sequences from individuals and from tissue. The NOVX sequences of the invention uniquely represent portions of the human genome. Allelic variation Occurs to some degree in the coding regions of these sequences, and to a greater degree in the noncoding regions. It is estimated that allelic variation between individual humans occurs with a frequency of about once per each 500 bases. Much of the allelic variation is due to shingle nucleotide polymorphisms (SNPs), which include restriction fragment length polymorphisms (RFLPs).

[0261] Each of the sequences described herein can, to some degree, be used as a standard against which DNA from an individual can be compared for identification purposes. Because greater numbers of polymorphisms occur in the noncoding regions, fewer sequences are necessary to differentiate individuals. The noncoding sequences can comfortably provide positive individual identification with a panel of perhaps 10 to 1,000 primers that each yield a noncoding amplified sequence of 100 bases. If coding sequences, such as those of SEQ ID NO: 2n−1, wherein n i s an integer between 1 and 88, are used, a more appropriate number of primers for positive individual identification would be 500-2,000.

[0262] Predictive Medicine

[0263] The invention also pertains to the field of predictive medicine in which diagnostic assays, prognostic assays, pharmacogenomic, and monitoring clinical trials are used for prognostic (predictive) purposes to thereby treat an individual prophylactically. Accordingly, one aspect of the invention relates to diagnostic assays for determining NOVX protein and/or nucleic acid expression as well as NOVX activity, in the context of a biological sample (e.g., blood, serum, cells, tissue) to thereby determine %whether an individual is afflicted wvitlh a disease or disorder, or is at risk of developing a disorder, associated with aberrant NOVX expression or activity. The disorders include metabolic disorders, diabetes, obesity, infectious disease, anorexia, cancer-associated cachexia, cancer, neurodegenerative disorders Alzheimer's Disease, Parkinison's Disorder, immune disorders, and hemlatopoietic disorders, and the various dyslipidemias, metabolic disturbances associated with obesity, the metabolic syndrome X and wasting disorders associated With chronic diseases and various cancers. The invention also provides for prognostic (or predictive) assays for determining( whether an individual is at risk of developing a disorder associated with NOVX protein, nucleic acid expression or activity. For example, mutations in a NOVX gene can be assayed in a biological sample. Such assays can be used for prognostic or predictive purpose to thereby prophylactically treat an individual prior to the onset of a disorder characterized by or associated with NOVX protein, nucleic acid expression, or biological activity.

[0264] Another aspect of the invention provides methods for determining NOVX protein, nucleic acid expression or activity in an individual to thereby select appropriate therapeutic or prophylactic agents for that individual (referred to herein as “pharmacogenomics”). Pharmacogenomics allows for the selection of agents (e.g., drugs) for therapeutic or prophylactic treatment of an individual based on the genotype of the individual (e.g., the genotype of the individual examined to determine the ability of the individual to respond to a particular agent.)

[0265] Yet another aspect of the invention pertains to monitoring the influence of agents (e.g., drugs, compounds) on the expression or activity of NOVX in clinical trials.

[0266] These and other agents are described in further detail in the following sections.

[0267] Diagnostic Assays

[0268] An exemplary method for detecting the presence or absence of NOVX in a biological sample involves obtaining a biological sample from a test subject and contacting the biological sample with a compound or an agent capable of detecting NOVX protein or nucleic acid (e.g., mRNA, genomic DNA) that encodes NOVX protein Such that the presence of NOVX is detected in the biological sample. An agent for detecting NOVX mRNA or genomic DNA is a labeled nucleic acid probe capable hybridizing to NOVX mRNA or genomic DNA. The nucleic acid probe can be, for example, a full-length NOVX nucleic acid, such as the nucleic acid of SEQ ID NO: 2n−1, wherein n is an integer between 1 and 89 or portion thereof, such as an oligonucleotide of at least 15. 30, 50. 100, 250 or 500 nucleotides in length and sufficient to specifically hybridize under stringent conditions to NOVX mRNA or genomic DNA. Other suitable probes for use in the diagnostic assays of the invention are described herein.

[0269] An agent for detecting NOVX protein is an antibody capable of binding to NOVX protein, preferably an antibody Faith a detectable label. Antibodies can be polyclonal, or mire preferably, monoclonal. An intact antibody, or a flagment thereof (e.g., Fab or F(ab′)₂) can be used. The term “labeled”. With regard to the probe or antibody, is intended to encompass direct labeling of the probe or antibody by coupling (i.e., physically linking) a detectable substance to the probe or antibody, as well as indirect labeling of the probe or antibody by reactivity with another reagent that is directly labeled. Examples of indirect labeling include detection of a primary antibody using a fluorescently-labeled secondary antibody and end-labeling of a DNA probe with biotin such that it can be detected with fluorescently-labeled streptavidin. The term “biological sample” is intended to include tissues, cells and biological fluids isolated from a subject, as well as tissues, cells and fluids present within a subject. That is, the detection method of the invention can be used to detect NOVX mRNA, protein, or genomic DNA in a biological sample in vitro as well as in vivo. For example, in vito techniques for detection of NOVX mRNA include Northern hybridizations and in situ hybridizations. In vitro techniques for detection of NOVX protein include enzyme linked immunosorbent assays (ELISAs), Western blots, immunopecipitations, and immunofluorescence. In vitro techniques for detection of NOVX genomic DNA include Southern hybridizations. Furthermore, in vivo techniques for detection of NOVX protein include introducing into a subject a labeled anti-NOVX antibody. For example, the antibody can be labeled with a radioactive marker whose presence and location in a subject can be detected by standard imaging techniques.

[0270] In one embodiment, the biological sample contains protein molecules from the test subject. Alternatively, the biological sample can contain mRNA molecules from the test subject or genomic DNA molecules from the test subject. A preferred biological sample is a peripheral blood Leukocyte sample isolated by conventional means from a subject.

[0271] In another embodiment, the methods further involve obtaining a control biological sample from a control subject, contacting the control sample with a Compound or agent capable of detecting NOVX protein, mRNA, or genomic DNA, such that the presence of NOVX protein, mRNA or genomic DNA is detected in the biological sample, and comparing the presence of NOVX protein. mRNA or genomic DNA in the control sample with the presence of NOVX protein, mRNA or genomic DNA in the test sample.

[0272] The invention also encompasses kits for detecting the presence of NOVX in a biological sample. For example, the kit can comprise: a labeled compound or agent capable of detecting NOVX protein or mRNA in a biological sample; means for determining the amount of NOVX in the sample; and means for comparing the amount of NOVX in the sample with a standard. The compound or agent can be packaged in a suitable container. The kit can further comprise instructions for using, the kit to detect NOVX protein or nucleic acid.

[0273] Prognostic Assays

[0274] The diagnostic methods described herein can furthermore be utilized to identify subjects having or at risk of developing a disease or disorder associated with aberrant NOVX expression or activity. For example, the assays described herein, such as the preceding diagnostic assays or the following assays, can be utilized to identify a subject having or at risk of developing a disorder associated with NOVX protein, nucleic acid expression or activity. Alternatively, the prognostic assays can be utilized to identify a subject having or at risk for developing a disease or disorder. Thus, the invention provides a method for identifying a disease or disorder associated with aberrant NOVX expression or activity which a test sample is obtained from a subject and NOVX protein or nucleic acid (e.g., mRNA, genomic DNA) is detected, wherein the presence of NOVX protein or nucleic acid is diagnostic for a subject having or at risk of developing a disease or disorder associated with aberrant NOVX expression or activity. As used herein, a “test sample” refers to a biological sample obtained from a subject of interest. For example, a test sample can be a biological fluid (e.g., serum), cell sample, or tissue.

[0275] Furthermore, the prognostic assays described herein can be used to determine whether a subject can be administered an agent (e g., an agonist, antagonist, peptidomimetics, protein, peptide, nucleic acid, small molecule, or other drug candidate) to treat a disease or disorder associated with aberrant NOVX expression or activity. For example, such methods can be used to determine whether a subject can be effectively treated with an agent for a disorder. Thus, the invention provides methods for determining whether a subject can be effectively treated smith an agent for a disorder associated with aberrant NOVX expression or activity in which a test sample is obtained and NOVX protein or nucleic acid is detected (e.g., wherein the presence of NOVX protein or nucleic acid is diagnostic for a subject that can be administered the agent to treat a disorder associated with aberrant NOVX expression or activity).

[0276] The methods of the invention can also be used to detect genetic lesions in a NOVX gene, thereby determining if a subject with the lesions gene is at risk for a disorder characterized by aberrant cell proliferation and/or differentiation. In various embodiments, the methods include detecting, in a sample of cells from the subject, the presence or absence of a genetic lesion characterized by at least one of an alteration affecting the integrity of a gene encoding a NOVX-protein, or the misexpression of the NOVX genie. For example. Such genetic lesions can be detected by ascertaining the existence of at least one of: (i) a deletion of one or more nucleotides from a NOVX gene; (ii) an addition of one or more nucleotides to a NOVX gene; (iii) a substitution of one or more nucleotides of a NOVX gene, (iv) a chromosomal rearrangement of a NOVX gene; (v) an alteration in the level of a messenger RNA transcript of a NOVX gene, (vi) aberrant modification of a NOVX gene, such as of the methylation pattern of the genomic DNA, (vii) the presence of a non-wild-type splicing pattern of a messenger RNA transcript of a NOVX gene, (viii) a non-wild-type level of a NOVX protein, (ix) allelic loss of a NOVX gene, and (x) inappropriate post-translational modification of a NOVX protein. As described herein, there are a large number of assay techniques known in the art which can be used for detecting lesions in a NOVX gene. A preferred biological sample is a peripheral blood leukocyte sample isolated by conventional means from a subject. However, any biological sample containing nucleated cells may be used, including, for example, buccal mucosal cells.

[0277] In certain embodiments, detection of the lesion involves the use of a probe/primer in a polymerase chain reaction (PCR) (see, e.g., U.S. Pat. Nos. 4,683,195 and 4,683,202), such as anchor PCR or RACE PCR, or, alternatively, in a ligation chain reaction (LCR) (see. e.g., Landegran, et. al., 1988, Science 241: 1077-1080; and Nakazawa, et. al., 1994, Proc. Natl. Acad. Sci. USA 91: 360-364), the latter of which can be particularly useful for detecting point mutations in the NOVX-gene (see, Abravaya, et. al., 1995, Nucl. Acids Res. 23: 675-682). This method can include the steps of collecting a sample of cells from a patient, isolating nucleic acid (e.g., genomic, mRNA or both) from the cells of the sample, contacting the nucleic acid sample with one or more primers that specifically hybridize to a NOVX gene under conditions such that hybridization and amplification of the NOVX gene (if present) occurs, and detecting the presence or absence of an amplification product, or detecting the size of the amplification product and comparing the length to a control sample. It is anticipated that PCR and/or LCR may be desirable to use as a preliminary amplification step in conjunction with any of the techniques used for detecting mutations described herein.

[0278] Alternative amplification methods include: self sustained sequence replication (see. Guatelli, et. al., 1990, Proc. Natl. Acad. Sci. USA 87 1874-1 878) transcriptional amplification system (see, Kwoh, et. al., 1989, Proc. Natl. Acad. Sci. USA 86:11 73-1177); Qβ Replicase (see, Lizardi, et. al., 1988, BioTechnology 6: 11 97), or any other nucleic acid amplification method, followed by the detection of the amplified molecules using techniques well known to those of skill in the art. These detection schemes are especially useful for the detection of nucleic acid molecules if such molecules are present in very lo%, numbers.

[0279] In an alternative embodiment, mutations in a NOVX gene from a sample cell can be identified by alterations in restriction enzyme cleavage patterns. For example, sample and control DNA is isolated, amplified (optionally), digested with one or more restriction endonucleases, and fragment length sizes are determined by gel electrophoresis and compared. Differences in fragment length sizes between sample and control DNA indicates mutations in the sample DNA Moreover, the use of sequence specific ribozymes (see, e.g., U.S. Pat. No. 5,493,531) can be used to score for the presence of specific mutations by development or loss of a ribozyme cleavage site.

[0280] In other embodiments, genetic mutations in NOVX can be identified by hybridizing a sample and control nucleic acids, e.g., DNA or RNA, to high-density arrays containing hundreds or thousands of oligonucleotides probes. See, e.g., Cronin, et. al., 1996, Human Mutation 7: 244-255; Kozal, et. al., 1996, Nat. Med. 2: 753-759. For example, genetic mutations in NOVX can be identified in two dimensional arrays containing light-generated DNA probes as described in Cronin, et. al., supra. Briefly, a first hybridization array of probes can be used to scan through long stretches of DNA in a sample and control to identify base changes between the sequences by making linear arrays of sequential overlapping probes. This step allows the identification of point mutations. This is followed by a second hybridization array that allows the characterization of specific mutations by using smaller, specialized probe arrays complementary to all variants or mutations detected. Each mutation array is composed of parallel probe sets one complementary to the wild-type gene and the other complementary to the mutant gene.

[0281] In yet another embodiment, any of a variety of sequencing( reactions known in the art can be used to directly sequence the NOVX gene and detect mutations by comparing the sequence of the sample NOVX with the corresponding wild-type (control) sequence. Examples of sequencing, reactions include those based on techniques developed by Maxim and Gilbert, 1977, Proc. Natl. Acad. Sci. USA 4 74: 560 or Sanger, 1977, Proc. Natl. Acad. Sci. USA, 74: 5463. It is also contemplated that any of a variety of automated sequencing procedures can be utilized when performing the diagnostic assails (see, e (e Naeve, et. al., 1995, Biotechiques 19: 448), including sequencing by mass spectrometry (see. e.g., PCT International Publication No. WO 94/16101; Cohen, et. al., 1996 Adv. Chromatography 36: 127-162; and Griffin, et. al., 1993, Appl. Biochem Biotechnol. 38: 147-159).

[0282] Other methods for detecting mutations in the NOVX genie include methods in which protection from cleavage agents is used to detect mismatched bases in RNA/RNA or RNA/DNA heteroduplexes. See, e.g., Myers, et. al., 1985, Sciences 230: 1242. In general, the art technique of “mismatch cleavage” starts by providing heteroduplexes of formed by hybridizing (labeled) RNA or DNA containing the wild-type NOVX sequence with potentially mutant RNA or DNA obtained from a tissue sample. The double-stranded duplexes are treated with an agent that cleaves single-stranded regions of the duplex such as which will exist due to basepair mismatches between the control and sample strands. For instance, RNA/DNA duplexes can be treated with RNase and DNA/DNA hybrids treated with S₁ nuclease to enzymatically digesting the mismatched regions. In other embodiments, either DNA/DNA or RNA/DNA duplexes can be treated with hydroxylamine or osmium tetroxide and with piperidine in order to digest mismatched regions. After digestion of the mismatched regions, the resulting material is then separated by size on denaturing polyacrylamide gels to determine the site of mutation. See, e.g., Cotton, et. al., 1988, Proc. Natl. Acad. Sci. USA 85: 4397; Saleeba, et. al., 1992, Methods Enzymol. 217: 286-295. In an embodiment, the control DNA or RNA can be labeled for detection.

[0283] In still another embodiment, the mismatch cleavage reaction employs one or more proteins that recognize mismatched base pairs in double-stranded DNA (so called “DNA mismatch repair” enzymes) in defined systems for detecting and mapping point mutations in NOVX cDNAs obtained from samples of cells. For example, the mutY enzyme of E. coli cleaves A at G/A mismatches and the thymidine DNA glycosylase from HeLa cells cleaves T at G/T mismatches. See, e.g., Hsu, et. al., 1994, Cacincogenesis 15: 1657-1662. According to an exemplary embodiment, a probe based on a NOVX sequence, e g. a wild-type NOVX sequence, is hybridized to a cDNA or other DNA product from a test cell(s). The duplex is treated with a DNA mismatch repair enzyme, and the cleavage products, if any, can be detected from electrophoresis protocols or the like. See, e.g., U.S. Pat. No. 5,.459,039.

[0284] In other embodiments, alterations in electrophoretic mobility will be used to identify mutations in NOVX genes. For example, single strand conformation polymorphisms (SSCP) may be used to detect differences in electrophoretic mobility between mutant and wild type nucleic acids. See, e.g , Orita, et. al., 1989, Proc. Natl. Acad. Sci. USA: 86: 2766; Cotton, 1993, Mutat. Res. 285: 125-144; Hayashi, 1992, Genet. Anal. Tech. Appl. 9: 73-79. Single-stranded DNA fragments of sample and control NOVX nucleic acids ill be denatured and allowed to renature. The secondary structure of single-stranded nucleic acids varies according to sequence, the resulting alteration in electrophoretic mobility enables the detection of even a single base change. The DNA fragments may be labeled or detected with labeled probes. The sensitivity of the assay may be enhanced by using RNA (rather than DNA), in which the secondary structure is mole Sensitive to a change in sequence. In one embodiment, the subject method utilizes heteroduplex analysis to separate double stranded heteroduplex molecules on the basis of changes in electrophoretic mobility. See, e.g. Keen, et. al., 1991, Trends Genet. 7: 5.

[0285] In yet another embodiment, the movement of mutant or wild-type fragments in polyacrylamide gels containing a gradient of denaturant is assayed using denaturing gradient gel electrophoresis (DGGE). See, e.g., Myers, et. al., 1985, Nature 313: 495. When DGGE is used as the method of analysis, DNA will be modified to insure that it does not completely denature, for example by adding a GC clamp of approximately 40 bp of high-melting GC-rich DNA by PCR. In a further embodiment, a temperature gradient is used in place of a denaturing gradient to identify differences in the mobility of control and sample DNA. See, e.g., Rosenbaum and Reissner, 1987, Biophys. Chem. 265: 12753.

[0286] Examples of other techniques for detecting point mutations include, but are not limited to, selective oligonucleotide hybridization, selective amplification, or selective primer extension. For example, oligonucleotide primers may be prepared in which the known mutation is placed centrally and then hybridized to target DNA under conditions that permit hybridization only if a perfect match is found. See, e.g., Saiki, et. al., 1986, Nature 324: 163; Saiki, et. al., 1989, Proc. Natl. Acac. Sci. USA 86: 6230. Such allele specific oligonucleotides are hybridized to PCR amplified target DNA or a number of different mutations when the oligonucleotides are attached to the hybridizing membrane and hybridized with labeled target DNA.

[0287] Alternatively, allele specific amplification technology that depends on selective PCR amplification may be used in conjunction with the instant invention. Oligonucleotides used as primers for specific amplification may carry the mutation of interest in the center of the molecule (so that amplification depends on differential hybridization; see, e.g. Gibbs. et. al., 1989, Nucl. Acids Res. 17: 2437-2448) or at the extreme 3′-terminus of one primer where, under appropriate conditions, mismatch can prevent, or reduce polymerase extension (see, e.g., Prossner, 1993, Tibtech. 1: 238). In addition it may be desirable to introduce a novel restriction site in the region of the mutation to create cleavage-based detection. See, e.g., Gasparini, et. al., 1992, Mol. Cell Probes 6: 1. It is anticipated that in certain embodiments amplification may also be performed using, Taq ligase or amplification. See e.g., Barany, 1991, Proc. Natl. Acad. Sci. USA 88: 189. In such cases, ligation will occur only if there is a perfect match at the 3′-terminus of the 5′ sequence, making it possible to detect the presence of a known mutation at a specific site by looking for the presence or absence of amidification.

[0288] The methods described herein may be performed, for example, by utilizing pre-packaged diagnostic kits comprising at least one probe nucleic acid or antibody reagent described herein, which may be conveniently used, e.g., in clinical settings to diagnose patients exhibiting symptoms or family history of a disease or illness involving a NOVX gene.

[0289] Furthermore, any cell type or tissue, preferably peripheral blood leukocytes, in which NOVX is expressed may be utilized in the prognostic assays described herein. However, any biological sample containing nucleated cells may be used, including, for example, buccal mucosal cells.

[0290] Pharmacogenomics

[0291] Agents, or modulators that have a stimulatory or inhibitory effect on NOVX activity (e.g., NOVX gene expression), as identified by a screening assay described herein can be administered to individuals to treat (prophylactically or therapeutically) disorders. The disorders include but are not limited to, e.g.. those diseases, disorders and conditions listed above, and more particularly include those diseases, disorders, or conditions associated with homologs of a NOVX protein, such as those summarized in Table A.

[0292] In conjunction with such treatment, the pharmacogenomics (i.e., the study of the relationship between an individual's genotype and that individual's response to a foreign compound or drug) of the individual may be considered. Differences in metabolism of therapeutics can lead to severe toxicity or therapeutic failure by altering( the relation between dose and blood concentration of the pharmacologically active drug. Thus, the pharmacogenomics of the individual permits the selection of effective agents (e.g., drugs) for prophylactic or therapeutic treatments based on a consideration of the individual's genotype. Such pharmacogenomics can further be used to determine appropriate dosages and therapeutic regimens. Accordingly, the activity of NOVX protein, expression of NOVX nucleic acid, or mutation content of NOVX genes in an individual can be determined to thereby select appropriate agent(s) for therapeutic or prophylactic treatment of the individual.

[0293] Pharmacologic deals with clinically significant hereditary variations in the response to drugs Clue to altered drug disposition and abnormal action in affected persons. See e.g., Eichelbaum, 1996, Clin. Exp. Pharmacol. Physiol., 23: 983-985; Linder, 1997, Clin. Chem., 43: 254-266. In general, two types of pharmacogenetic conditions call be differentiated. Genetic conditions transmitted as a single factor altering, the way drugs act on the body (altered drug action) or genetic conditions transmitted as single factors altering the way the body acts on drugs (altered drug metabolism). These pharmacogenetic conditions can occur either as rare defects or as polymorphisms. For example, glucose-6-phosphate dehydrogenase (G6PD) deficiency is a common inherited enzymopathy in which the main clinical complication is hemolysis after ingestion of oxidant drugs (anti-malarials, sulfonamides, analgesics, nitrofurans) and consumption of fava beans.

[0294] As an illustrative embodiment, the activity of drug metabolizing enzymes is a major determinant of both the intensity and duration of drug action. The discovery of genetic polymorphisms of drug metabolizing enzymes (e.g., N-acetyltransferase 2 (NAT 2) and cytochrome pregnancy zone protein precursor enzymes CYP2D6 and CYP2C19) has provided an explanation as to why some patients do not obtain the expected drug effects or show exaggerated drug response and serious toxicity after taking the standard and safe dose of a drug. These polymorphisms are expressed in two phenotypes in the population, the extensive metabolizer (EM) and poor metabolizer (PM). The prevalence of PM is different among different populations. For example, the gene coding for CYP2D6 is highly polymorphic and several mutations have been identified in PM, which all lead to the absence of functional CYP2D6. Poor metabolizers of CYP2D6 and CYP2C19 quite frequently experience exaggerated drug response and side effects when they receive standard doses. If a metabolite is the active therapeutic moiety, PM show no therapeutic response, as demonstrated for the analgesic effect of codeine mediated by its CYP2D6-formed metabolite morphine. At the other extreme are the so called ultra-rapid metabolizers who do not respond to standard doses. Recently, the molecular basis of ultra-rapid metabolism has been identified to be due to CYP2D6 gene amplification.

[0295] Thus, the activity of NOVX proteins expression of NOVX nucleic acid, or mutation content of NOVX genes in an individual can be determined to thereby select appropriate agent(s) for therapeutic or prophylactic treatment of the individual. In addition, pharmacogenetic studies can be used to apply genotyping of polymorphic alleles encoding drug-metabolizing enzymes to the identification of an individual's drug responsiveness phenotype. This knowledge, when applied to dosing or drug selection, can avoid adverse reactions or therapeutic failure and thus enhance therapeutic or prophylactic efficiency when treating a subject with a NOVX modulator, such as a modulator identified by one of the exemplary screening assays described herein.

[0296] Monitoring of Effects During Clinical Trials

[0297] Monitoring the influence of agents (e.g, drugs, compounds) on the expression or activity of NOVX (e.g., the ability to modulate aberrant cell proliferation and/or differentiation) can be applied not only in basic drug screening, but also in clinical trials. For example, the effectiveness of an agent determined by a screening assay as described herein to increase NOVX gene expression, protein levels, or unregulated NOVX activity, can be monitored in clinical trails of subjects exhibiting decreased NOVX gene expression, protein levels, or downregulated NOVX activity. Alternatively, the effectiveness of an agent determined by a screening assay to decrease NOVX gene expression, protein levels, or downregulate NOVX activity, can be monitored in clinical trails of subjects exhibiting increased NOVX gene expression, protein levels, or upregulated NOVX activity. In such clinical trials, the expression or activity of NOVX and, preferably, other genes that have been implicated in, for example, a cellular proliferation or immune disorder can be used as a “read out” or markers of the immune responsiveness of a particular cell.

[0298] By way of example, and not of limitation, genes, including, NOVX, that are modulated in cells by treatment with an agent (e.g., compound, drug or small molecule) that modulates NOVX activity (e.g., identified in a screening assay as described herein) can be identified. Thus, to study the effect of agents on cellular proliferation disorders, for example, in a clinical trial, cells can be isolated and RNA prepared and analyzed for the levels of expression of NOVX and other genes implicated in the disorder. The levels of gene expression (i.e., a gene expression pattern) can be quantified by Northern blot analysis or RT-PCR, as described herein, or alternatively by measuring the amount of protein produced, by one of the methods as described herein, or by measuring the levels of activity of NOVX or other genes. In this manner, the gene expression pattern can serve as a marker, indicative of the physiological response of the cells to the agent. Accordingly, this response state may be determined before, and at various points during treatment of the individual with the agent.

[0299] In one embodiment, the invention provides a method for monitoring the effectiveness of treatment of a subject with an agent (e.g., an agonist, antagonist, protein, peptide, peptidomimetic, nucleic acid, small molecule, or other drug candidate identified by the screening assays described herein) comprising the steps of (i) obtaining a pre-administration sample from a subject prior to administration of the agents (ii) detecting the level of expression of a NOVX protein, mRNA, or genomic DNA in the preadministration sample; (iii) obtaining one or more post-administration samples from the subject; (iii) detecting the level of expression or activity of the NOVX protein. mRNA, or genomic DNA i tile post-administration samples; (v) comparing the level of expression or activity of the NOVX protein, mRNA, or genomic DNA in the pre-administration sample with the NOVX protein, mRNA, or genomic DNA i n the post ad ministration sample or samples; and (ii) altering the administration of the agent to the subject accordingly. For example, increased administration of the agent may be desirable to increase the expression or activity of NOVX to higher levels than detected, i.e., to increase the effectiveness of the agent. Alternatively, decreased administration of the agent may be desirable to decrease expression or activity of NOVX to lower levels than detected, i.e., to decrease the effectiveness of the agent.

[0300] Methods of Treatment

[0301] The invention provides for both prophylactic and therapeutic methods of treating a subject at risk of (or susceptible to) a disorder or having a disorder associated with aberrant NOVX expression or activity. The disorders include but are not limited to, e.g., those diseases, disorders and conditions listed above, and more particularly include those diseases, disorders, or conditions associated with homologs of a NOVX protein, such as those summarized in Table A.

[0302] These methods of treatment will be discussed more fully, below.

[0303] Diseases and Disorders

[0304] Diseases and disorders that are characterized by increased (relative to a subject not suffering from the disease or disorder) levels or biological activity may be treated with Therapeutics that antagonize (i.e.. reduce or inhibit) activity. Therapeutics that antagonize activity may be administered in a therapeutic or prophylactic manner. Therapeutics that may be utilized include, but are not limited to: (i) an aforementioned peptide or analogs, derivatives, fragments or homologs thereof; (ii) antibodies to an aforementioned peptide; (iii) nucleic acids encoding an aforementioned peptide; (ill) administration of antisense nucleic acid and nucleic acids that are -dysfunctional (i.e., due to a heterologous insertion within the coding sequences of coding sequences to an aforementioned peptide) that are utilized to “knockout” endogenous function of all aforementioned peptide by homologous recombination (see, e.g. Capecchi, 1989, Science 244: 1288-1 292); or (v) modulators (i.e., inhibitors, agonist and antagonists, including additional peptide mimetic of the invention or antibodies specific to a peptide of the invention) that alter the interaction between an aforementioned peptide and its binding partner.

[0305] Diseases and disorders that are characterized by decreased (relative to a subject not suffer-in(g from the disease or disorder) levels or biological activity may be treated with Therapeutics that increase (i.e., are agonists to) activity. Therapeutics that unregulated activity may be administered in a therapeutic or prophylactic manner. Therapeutics that may be utilized include, but are not limited to, an aforementioned peptide, or analogs, derivatives, fragments or homologs thereof; or an agonist that increases bioavailability.

[0306] Increased or decreased levels can be readily detected by quantifying peptide and/or RNA, by obtaining a patient tissue sample (e.g., from biopsy tissue) and assaying it in vivo for RNA or peptide levels, structure and/or activity of the expressed peptides (or mRNAs of an aforementioned peptide). Methods that are well-known within the art include, but are not limited to, immunoassays (e.g., by Western blot analysis, immunoprecipitation followed by sodium dodecyl sulfate (SDS) polyacrylamide gel electrophoresis, immunocytochemistry, etc.) and/or hybridization assays to detect expression of mRNAs (e.g., Northern assays, dot blots, in sit i hybridization, and the like).

[0307] Prophylactic Methods

[0308] In one aspect, the invention provides a method for preventing, in a subject, a disease or condition associated with an aberrant NOVX expression or activity, by administering to the subject an agent that modulates NOVX expression or at least one NOVX activity. Subjects at risk for a disease that is caused or contributed to by aberrant NOVX expression or activity can be identified by, for example, any or a combination of diagnostic or prognostic assays as described herein. Administration of a prophylactic agent can occur prior to the manifestation of symptoms characteristic of the NOVX aberrancy, such that a disease or disorder is prevented or, alternatively, delayed in its progression. Depending upon the type of NOVX aberrancy, for example, a NOVX agonist or NOVX antagonist agent can be used for treating the subject. The appropriate agent can be determined based on screening assays described herein. The prophylactic methods of the invention are further discussed in the following subsections.

[0309] Therapeutic Method

[0310] Another aspect of the invention pertains to methods of modulation, NOVX expression or activity for therapeutic purposes. The modulatory method of the invention involves contacting a cell with an agent that modulates one or more of the activities of NOVX protein activity associated With the cell. An agent that modulates NOVX protein activity can be an agent as described herein, such as a nucleic acid or a protein, a naturally-occurring cognate ligand of a NOVX protein, a peptide, a NOVX peptidomimetic, or other small molecule. In one embodiment, the agent stimulates one or more NOVX protein activity. Examples of Such stimulatory agents include active NOVX protein and a nucleic acid molecule encoding NOVX that has been introduced into the cell. In another embodiment, the agent inhibits one or more NOVX protein activity. Examples of such inhibitory agents include antisense NOVX nucleic acid molecules and anti-NOVX antibodies. These modulatory methods can be performed in vito (e.g., by culturing the cell with the agent) or, alternatively, in vivo (e.g., by administering the agent to a subject). As such, the invention provides methods of treating an individual afflicted with a disease or disorder characterized by aberrant expression or activity of a NOVX protein or nucleic acid molecule. In one embodiment, the method involves administering an agent (e.g., an agent identified by a screening assay described herein, or combination of agents that modulates (e.g., up-regulates or down-regulates) NOVX expression or activity. In another embodiment, the method involves administering a NOVX protein or nucleic acid molecule as therapy to compensate for reduced or aberrant NOVX expression or activity.

[0311] Stimulation of NOVX activity is desirable in situations in which NOVX is abnormally downregulated and/or which increased NOVX activity is likely to have a beneficial effect. One example of such a situation is where a subject has a disorder characterized by aberrant cell proliferation and/or differentiation (e.g., cancer or immune associated disorders). Another example of such a situation is where the subject has a gestational disease (e.g., preclampsia).

[0312] Determination of the Biological Effect of the Therapeutic

[0313] In various embodiments of the invention, suitable in vitro or in vivo assays are performed to determine the effect of a specific Therapeutic and whether its administration is indicated for treatment of the affected tissue.

[0314] In various specific embodiments, in vitro assays may be performed with representative cells of the type(s) involved in the patient's disorder, to determine if a given Therapeutic exerts the desired effect upon the cell type(s). Compounds for use in therapy may be tested in suitable animal model systems including, but not limited to rats, mice chicken, cows, monkeys, rabbits, and the like, prior to testing will human subjects. Similarly, for in vivo testing, any of the animal model system known in the art may be used prior to administration to human subjects.

[0315] Prophylactic and Therapeutic Uses of the Compositions of the Invention

[0316] The NOVX nucleic acids and proteins of the invention are useful in potential prophylactic and therapeutic applications implicated in a variety of disorders. The disorders include but are not limited to, e.g., those diseases, disorders and conditions listed above, and more particularly include those diseases, disorders, or conditions associated with homologs of a NOVX protein, such as those summarized in Table A.

[0317] As an example, a cDNA encoding the NOVX protein of the invention may be useful in gene therapy, and the protein may be useful when administered to a subject in need thereof. By way of non-limiting example, the compositions of the invention will have efficacy for treatment of patients suffering from diseases, disorders, conditions and the like, including but not limited to those listed herein.

[0318] Both the novel nucleic acid encoding the NOVX protein, and the NOVX protein of the invention, or fragments thereof, may also be useful in diagnostic applications, wherein the presence or amount of the nucleic acid or the protein are to be assessed. A further use could be as an anti-bacterial molecule (i.e., some peptides have been found to possess anti-bacterial properties). These materials are further useful in the generation of antibodies, which immunospecifically-bind to the novel substances of the invention for use in therapeutic or diagnostic methods.

[0319] The invention will be further described in the following examples, which do not limit the scope of the invention described in the claims.

### EXAMPLES

### Example A

[0320] Polynucleotide and Polypeptide Sequences, and Homology Data

[0321] The NOV1 clone was analyzed, and the nucleotide and encoded polypeptide sequences are shown in Table 1A.

TABLE 1A
NOV1 Sequence Analysis

| | SEQ ID NO:1 | 975 bp |
|---|---|---|
| NOV1a, | GTCCTTGGAGGCCAGAGGGGACTCTGAGCATCGGAAAGCAGGATGCCTGGTTTGCTTT | |
| CG102071-03 | TATGTGAACCGACAGAGCTTTACAACATCCTGAATCAGGCCACAAAACTCTCCAGATT | |
| DNA | AACAGACCCCAACTATCTCTGTTTATTGGATGTCCGTTCCAAATGGGAGTATGACGAA | |
| Sequence | AGCCATGTGATCACTGCCCTTCGAGTGAAGAAGAAAAATAATGAATATCTTCTCCCGG | |
| | AGTCTGTGGACCTGGAGTGTGTGAAGTACTGCGTGGTGTATGATAACAACAGCAGCAC | |
| | CCTGGAGATACTCTTAAAAGATGATGATGATGATTCAGACTCTGATGGTGATGGCAAA | |
| | GATCTTGTGCCTCAAGCAGCCATTGAGTATGGCAGGATCCTGACCCGCCTCACCCACC | |
| | ACCCCGTCTACATCCTGAAAGGGGGCTATGAGCGCTTCTCAGGCACGTACCACTTTCT | |
| | CCGGACCCAGAAGATCATCTGGATGCCTCAGGAACTGGATGCATTTCAGCCATACCCC | |
| | ATTGAAATCGTGCCAGGGAAGGTCTTCGTTGGCAATTTCAGTCAAGCCTGTGACCCCA | |
| | AGATTCAGAAGGACTTGAAAATCAAAGCCCATGTCAATGTCTCCATGGATACAGGGCC | |
| | CTTTTTTGCAGGCGATGCTGACAAGCTTCTGCACATCCGGATAGAAGATTCCCCGGAA | |
| | GCCCAGATTCTTCCCTTCTTACGCCACATGTGTCACTTCATTGGGTATCAGCCGCAGT | |
| | TGTGCCGCCATCATAGCCTACCTCATGCATAGTAACGAGCAGACCTTGCAGAGGTCCT | |
| | GGGCCTATGTCAAGAAGTGCAAAAACAACATGTGTCCAAATCGGGGATTGGTGAGCCA | |
| | GCTGCTGGAATGGGAGAAGACTATCCTTGGAGATTCCATCACAAACATCATGGATCCG | |
| | CTCTACTGATCTTCTCCGAGGCCCACCGAAGGGTACTGAAGAGCCTC | |
| | ORF Start: ATG at 43 | ORF Stop: TAG at 784 |
| | SEQ ID NO:2 | 247 aa MW at 28330.1 kD |

| | |
|---|---|
| NOV1a | MPGLLLCEPTELYNILNQATKLSRLTDPNYLCLLDVRSKWEYDESHVTTALRVKKKNN |
| CG102071-03 | EYLLPESVDLECVKYCVVYDNNSSTLETLLKDDDDDSDSDGDGKDLVPQAAIEYGRIL |
| Protein | TRLTHHPVYILKGGYERFSGTYHFLRTQKIIWMPQELDAPQPYPTEIVPGKVFVGNFS |
| Sequence | QACDPKTQKDLKIKAHVNVSMDTGRPFAGDADKLLHIRTEDSPEAQILPFLRHMCHFI |
| | GYQPQLCRHHSLPHA |

[0322] Further analysis of the NOV1 a protein yielded the following properties shown in Table 1B.

TABLE 1B
Protein Sequence Properties NOV1a

| | |
|---|---|
| PSort | 0.4500 probability located in cytoplasm; 0.3000 probability |
| analysis: | located in microbody (peroxisome); 0.1000 probability located |
| | in mitochondrial matrix space; 0.1000 probability located in |
| | lysosome (lumen) |
| SignalP | No Known Signal Sequence Predicted |
| analysis: | |

[0323] A search of the NOV1 a protein against the Geneseq database, a proprietary database that contains sequences published in patents and patent publication, yielded several homologous proteins shown in Table 1C.

TABLE 1C
Geneseq Results for NOV1a

| | | NOV1a | | |
|---|---|---|---|---|
| | Protein/Organism/ | Residues/ | Identities/ | |
| Geneseq | Length [Patent #, | Match | Similarities for the | Expect |
| Identifier | Date] | Residues | Matched Region | Value |
| AAY44241 | Human cell signalling protein-4- | 1 . . . 232 | 231/232 (99%) | e−137 |
| | Homo sapiens, 313 aa. [WO9958558- | 1 . . . 232 | 232/232 (99%) | |
| | A2, 18 Nov. 1999] | | | |
| AAY07958 | Human secreted protein fragment #2 | 71 . . . 232 | 162/162 (100%) | 1e−93 |
| | encoded from gene 6-Homo sapiens, | 34 . . . 195 | 162/162 (100%) | |
| | 276 aa. [WO9918208-A1, | | | |
| | 15 Apr. 1999] | | | |
| AAM91270 | Human immune/haematopoietic | 151 . . . 209 | 56/59 (94%) | 1e−26 |
| | antigen SEQ ID NO: 18863-Homo | 61 . . . 119 | 57/59 (95%) | |
| | sapiens, 123 aa. [WO200157182-A2, | | | |
| | 9 Aug. 2001] | | | |
| AAG01344 | Human secreted protein, SEQ ID NO: | 1 . . . 59 | 55/59 (93%) | 7e−26 |
| | 5425-Homo sapiens, 125 aa. | 1 . . . 59 | 57/59 (96%) | |
| | [EP1033401-A2, 6 Sep. 2000] | | | |
| ABB68968 | Drosophila melanogaster polypeptide | 160 . . . 215 | 23/57 (40%) | 0.005 |
| | SEQ ID NO 33696-Drosophila | 89 . . . 145 | 32/57 (55%) | |
| | melanogaster, 348 aa. | | | |
| | [WO200171042-A2, 27 Sep. 2001] | | | |

[0324] In a BLAST search of public sequence databases, the NOV1a protein was found to have homology to the proteins shown in the BLASTP data in Table 1D.

TABLE 1D
Public BLASTP Results for NOV1a

| | | NOV1a | | |
|---|---|---|---|---|
| Protein | | Residues/ | Identities/ | |
| Accession | | Match | Similarities for the | Expect |
| Number | Protein/Organism/Length | Residues | Matched Portion | Value |
| Q9Y6J8 | Map kinase phosphatase-like protein | 1 . . . 232 | 232/232 (100%) | e−137 |
| | MK-STYX-Homo sapiens (Human), | 1 . . . 232 | 232/232 (100%) | |
| | 313 aa. | | | |
| Q9UK07 | Map kinase phosphatase-like protein | 46 . . . 232 | 187/187 (100%) | e−108 |
| | MK-STYX-Homo sapiens (Human), | 1 . . . 187 | 187/187 (100%) | |
| | 221 aa (fragment). | | | |
| Q9DAR2 | Adult male testis cDNA, RIKEN full- | 1 . . . 232 | 153/240 (63%) | 5e−92 |
| | length enriched library, | 1 . . . 240 | 200/240 (82%) | |
| | clone: 1700001J05, full insert | | | |
| | sequence-Mus musculus (Mouse), | | | |
| | 321 aa. | | | |
| Q9UKG3 | Alternatively spliced dual specificity | 149 . . . 247 | 99/99 (100%) | 8e−55 |
| | phosphatase inhibitor MK-STYX- | 1 . . . 99 | 99/99 (100%) | |
| | Homo sapiens (Human), 99 aa | | | |
| | (fragment). | | | |
| Q9UKG2 | Alternatively spliced dual specificity | 149 . . . 232 | 84/84 (100%) | 4e−44 |
| | phosphatase inhibitor MK-STYX- | 1 . . . 84 | 84/84 (100%) | |
| | Homo sapiens (Human), 101 aa | | | |
| | (fragment). | | | |

[0325] PFam analysis predicts that the NOV1 a protein contains the domains shown in the Table 1E.

TABLE 1E
Domain Analysis of NOV1a

| | | Identities/ | |
|---|---|---|---|
| Pfam | | Similarities for | Expect |
| Domain | NOV1a Match Region | the Matched Region | Value |
| Rhodanese | 18 . . . 137 | 31/155 (20%) | 0.0041 |
| | | 86/155 (55%) | |

### Example 2

[0326] The NOV2 clone was analyzed, and the nucleotide and encoded polypeptide sequences are shown in Table 2A.

TABLE 2A
NOV2 Sequence Analysis

| | SEQ ID NO:3 | 1369 bp |
|---|---|---|
| NOV2a, | CACCGAGACGCGCCGGCGGACCGCGGGCGAGTGCAGCCGGTGACCCGGCGAGAGGCGG | |
| CG102734-01 | CGCCGCTCCCAAGATGTCGCAGACGGCCATGTCCGAAACCTACGATTTTTTGTTTAAG | |
| DNA | TTCTTGGTTATTGGAAATGCAGGAACTGGCAAATCTTGCTTACTTCATCAGTTTATTG | |
| Sequence | AAAAAAAATTCAAAGATGACTCAAATCATACAATAGGAGTGGAATTTGGTTCAAAGAT | |
| | ATAAATGTTGGTGGTAAATATGTAGTTACATATGGGATACAGCAGGACAAGAA | |
| | CGATTCAGGTCCGTGACGAGAAGTTATTACCGAGGCGCGGCCGGGGCTCTCCTCGTCT | |
| | ATGATATCACCAGCCGAGAAAAACCTACAATGCGCTTACTAATTGGTTAACAGATGCCCG | |
| | AATGCTAGCGAGCCAGAACATTGTGATCATCCTTTGTGGAAACAAGAAGGACCTGGAT | |
| | GCAGATCGTGAAGTTACCTTCTTAGAAGCCTCCAGATTTGCTCAAGAAAATGAGCTGA | |
| | TGTTTTTGGAAACAAGTGCGCTCACAGGGGAGAATGTAGAAGAGGCTTTTGTACAGTG | |
| | TGCAAGAAAAATACTTAACAAATCGAATCAGGTGAGCTGGACCCAGAAAGAATGGGC | |
| | TCAGGTATTCAGTACGGAGATGCTGCCTTGAGACAGCTGAGGTCACCGCGGCGCGCAC | |
| | AGGCCCCGAACGCTCAGGAGTGTGGTTGTTAGGAGAGCACACAGGTGTTCATACAGTG | |
| | GCATTTGGGACACAATCGTTGGAACCTGAAGAATCTGAAGTTTTTTTTACCACCATCT | |
| | TTTTCTACTCTGTATGGAAGTAGATCTTTATGGGGAAAAGAGAATTTGGGGTGTTCTG | |
| | CAAGCCAGTCAAAGTGGCACAGCAAATCATATAAATCGAATTAAATGGACAACACCGT | |
| | TAGATGTGTATGTAAAAATTTTCTGTTTCATATTTTTCCTTTCACTTTCGGTTTAAAA | |
| | CATGCTATATGTACTGTATGTCCTGTAGCCCAGTGCGGCTCCACAGCATGGAATCTGA | |
| | TGTATGATATGATAGAATGTGGCACTAAATGCAGTTTCAGATTTTATTTTTTTTAATC | |
| | ATATGAACTAAAATTGTCAATTGTGAGGTGTGCTTTTCTCATCATGTTGGTTATATTG | |
| | CACAATTGGTTATATTTATGACCTGATATTCAAAGACTCTGGCATTGATAGCCAGTGT | |
| | GTTTTCTTATTTAACTCCGTTTACTACATTCTACATGGTGTTTACGTGATCCACACTT | |
| | GAAATACTAGATCAGTAGACATTCACTAATATACCAAAATAAAATGAAAAATTGAGTT | |
| | TTTCCGTGAAAAAAAAAAAAAAAAAAAAAAAAAAA | |
| | ORF Start: ATG at 72 | ORF Stop: TAG at 726 |
| | SEQ ID NO:4 | 218 aa MW at 24389.4 kD |
| NOV2a, | MSQTAMSETYDFLPKFLVIGNAGTGKSCLLHQFIEKKFKDDSNHTIGVEFGSKIINVG | |
| CG102734-01 | GKYVKLQIWDTAGQERFFRSVTRSYYRGAAGALLVYDITSRETYNALTNWLTDARMLAS | |
| Protein | QNIVIILCGNKKDLDADREVTFLEASRFAQENELMFLETSALTGENVEEAFVQCARKI | |
| Sequence | LNKTESGELDPERMGSGIQYGDAALRQLRSPRRAQAPNAQECGC | |
| | SEQ ID NO:5 | 1747 bp |
| NOV2b, | GCCGGACGGAGGGTGGAGGGCCCTGCGCCTGCGCGGAGCTGGAGTCCGGCTGGGCCGC | |
| CG102734-02 | AGCCGCTGGGAGACCGGCGGTTGCCGTGGGGACCGGTCGGGCCCCTCCCTCCTCCGGT | |
| DNA | CCCCCGCCCCAGGTCCTTCCCCACCGAGACGCGCCGGCGGACCGCGGGCGAGTGCAGC | |
| Sequence | CGGTGACCCGGCGAGAGGCGGCGCCGCTCCCAAGATGTCGCAGACGGCCATGTCCGAA | |
| | ACCTACGATTTTTTGTTTAGTTCTTGGTTATTGGAATGCAGGAACTGGCAATCTT | |
| | GCTTACTTCATCAGTTTATTGAAAAAAAAATGTCCGTGACGAGAAGTTATTACCGAGG | |
| | CGCGGCCGGGGCTCTCCTCGTCTATGATATCACCAGCCGAGAAACCTACAATGCGCTT | |
| | ACTAATTGGTTAACAGATGCCCGAATGCTAGCGAGCCAGAACATTGTGATCATCCTTT | |
| | GTGGAACAAGAAGGACCTGGATGCAGATCGTGAAGTTACCTTCTTAGAAGCCTCCAG | |
| | ATTTGCTCAAGAATGAGCTGATGTTTTTGGAAACAAGTGCGCTCACAGGGGAGAAT | |
| | GTAGAAGAGGCTTTTGTACAGTGTGCAAGAAAAATACTTAACAAAATCGAATCAGGTG | |
| | AGCTGGACCCAGAAAGAATGGGCTCAGGTATTCAGTACGGAGATGCTGCCTTGAGACA | |
| | GCTGAGGTCACCGCGGCGCGCACAGGCCCCGAACGCTCAGGAGTGTGGTTGTTAGGAG | |
| | AGCACACAGGTGTTCATACAGTGGCATTTGGGACACAATCGTTGGAACCTGAAGAATC | |
| | TGAAGTTTTTTTTACCACCATCTTTTTCTACTCTGTATGGAAGTAGATCTTTATGGGG | |
| | AAGAGAATTTGGGGTGTTCTGCAAGCCAGTCAAAGTGGCACAGCAAATCATATAAA | |
| | TCGAATTAAATGGACAACACCGTTAGATGTGTATGTAAAAAAAATTTTCTGTTTCATATTT | |
| | TTCCTTTCACTTTCGGTTTAAAACATGCTATATGTACTGTATGTCCTGTAGCCCAGTG | |
| | CGGCTCCACAGCATGGAATCTGATGTATGATATGATAGAATGTGGCACTAAATGCAGT | |
| | TTCAGATTTTATTTTTTTTAATCATATGAACTAATTGTCAATTGTGAGGTGTGCTT | |
| | TTCTCATCATGTTGGTTATATTGCACAATTGGTTATATTTATGACCTGATATTCAAAG | |
| | ACTCTGGCATTGATAGCCAGTGTGTTTTCTTATTTAAAACTCCGTTTACTACATTCTACA | |
| | TGGTGTTTACGTGATCCACACTTGAATACTAGATCAGTAGACATTCACTAATATACC | |
| | AAAATAAAATGAAAAATTGAGTTTTTCCGTGAACTTTATACTGTCCAGCTCTGTTGAT | |
| | TTTAAAGCCTCTTCATCCAGGTCAGTTCAGGIAAGTATATCTGGAGTACCTGCTCTGTT | |
| | TTTGGCTGTGAGACTAGCACTAAGGATTCTGGTACCTTTACCCAAACCTACTGGGCTA | |
| | CTAATACTTCTCTCAGCAGTTGATCAAAAATACAATAGACCATGTAAGCTGGGGCCGCTC | |
| | ATCCACTTCCAGTTTGCTGGTCTCCCTGCTAGAAAAAACACATTGTACTGTGCTTTTTCT | |
| | GGAATTCAGTATAATGGCATCACTGCCTGTTTTTCACATCTTTTGTTTCCTGTTCATT | |
| | TTAAGGAAACCTACTAAATCCAGTTAATATTAAATGGACACCACTCAAAAAAAAAAAA | |
| | ORF Start: ATG at 209 | ORF Stop: TAG at 749 |
| | SEQ ID NO:6 | 180 aa MW at 20083.6 kD |
| NOV2b, | MSQTANSETYDFLFKFLVTGNAGTGKSCLLHQFIEKKMSVTRSYYRGAAGALLVYDIT | |
| CG102734-02 | SRETYNALTNWLTDARMLASQNIVITLCGNKKDLDADREVTFLEASRFAQENELMFLEI | |
| Protein | TSALTGENVEEAFVQCARKILNKTESGELDPERMGSGIQYGDAAALRQLRSPRRAQAPN | |
| Sequence | AQECGC | |
| | SEQ ID NO:7 | 687 bp |
| NOV2c, | CGCGGATCCACCATGTCGCAGACGGCCATGTCCGIAAAAlAACCTACGATTTTTTGTTTAAGT | |
| 209829447 | TCTTGGTTATTGGAAATGCAGGAACTGGCAAATCTTGCTTACTTCATCAGTTTATTGA | |
| DNA | AAAAAAAATTCAAAGATGACTCAAAATCATACAATAGGAGTGGAATTTGGTTCAAGATA | |
| Sequence | ATAAATGTTGGTGGTAAATATGTAAAGTTACTAAATGGGATACAGCAGGACAAGAAC | |
| | GATTCAGGTCCGTGACGAGAAGTTATTACCGAGGCGCGGCCGGGGCTCTCCTCGTCTA | |
| | TGATATCACCAGCCGAGAACCTACAATGCGCTTACTAATTGGTTAACAGATGCCCGA | |
| | ATGCTAGCGAGCCAGAACATTGTGATCATCCTTTGTGGCAAGAAGGACCTGGATG | |
| | CAGATCGTGAAGTTACCTTCTTAGAAGCCTCCAGATTTGCTCAAGAAAATGAGCTGAT | |
| | GTTTTTGGAAACAAGTGCGCTCACAGGGGAGAATGTAGAAGAGGCTTTTGTACAGTGT | |
| | GCAAGAAAAATACTTAACAAAATCGAATCAGGTGAGCTGGACCCAGAAAGAATGGGCT | |
| | CAGGTATTCAGTACGGAGATGCTGCCTTGAGACAGCTGAGGTCACCGCGGCGCGCACA | |
| | GGCCCCGAACGCTCAGGAGTGTGGTTGTTAGGCGGCCGCTTTTTTCCTT | |
| | ORF Start: at 1 | ORF Stop: TAG at 667 |
| | SEQ ID NO:8 | 222 aa MW at 24790.8 kD |

| | |
|---|---|
| NOV2c, | RGSTMSQTAMSETYDPLFKFLVIGNAGTGKSCLLHQFIEKKFKDDSNHTIGVEFGSKI |
| 209829447 | INVGGKYVKLQIWDTAGQERFRSVTRSYYRGAAGALLVYDITSRETYNALTNWLTDAR |
| Protein | MLASQNIVIILCGNKKDLDADREVTFLEASRFAQENELMFLETSALTGENVEEAFVQC |
| Sequence | ARKILNKTESGELDPERMGSGIQYGDAALRQLRSPRRAQAPNAQECGC |

[0327] Sequence comparison of the above protein sequences yields the following, sequence relationships shown in Table 2B.

TABLE 2B
Comparison of NOV2a against NOV2b and NOV2c.

| | | Identities/ |
|---|---|---|
| | NOV2a Residues/ | Similarities for |
| Protein Sequence | Match Residues | the Matched Region |
| NOV2b | 1 . . . 218 | 179/218 (82%) |
| | 1 . . . 180 | 179/218 (82%) |
| NOV2c | 1 . . . 218 | 218/218 (100%) |
| | 5 . . . 222 | 218/218 (100%) |

[0328] Further analysis of the NOV2a protein yielded the following properties shown in Table 2C.

TABLE 2C
Protein Sequence Properties NOV2a

| | |
|---|---|
| PSort | 0.6500 probability located in cytoplasm; 0.1000 |
| analysis: | probability located in mitochondrial matrix space; |
| | 0.1000 probability located in lysosome (lumen); |
| | 0.0245 probability located in microbody (peroxisome) |
| SignalP | No Known Signal Sequence Predicted |
| analysis: | |

[0329] A search of the NOV2a protein against the Geneseq database, a proprietary database that contains sequences published in patents and patent publication, yielded several homologous proteins shown in Table 2D.

TABLE 2D
Geneseq Results for NOV2a

| | | NOV2a | | |
|---|---|---|---|---|
| | Protein/Organism/ | Residues/ | Identities/ | |
| Geneseq | Length [Patent #, | Match | Similarities for | Expect |
| Identifier | Date] | Residues | the Matched Region | Value |
| AAB23762 | dRab4 amino acid sequence- | 6 . . . 218 | 186/213 (87%) | e−105 |
| | Unidentified, 213 aa. [CN1257124-A, | 1 . . . 213 | 198/213 (92%) | |
| | 21 Jun. 2000] | | | |
| AAB23763 | rRab4b amino acid sequence- | 6 . . . 218 | 185/213 (86%) | e−105 |
| | Unidentified, 213 aa. [CN1257124-A, | 1 . . . 213 | 197/213 (91%) | |
| | 21 Jun. 2000] | | | |
| AAB23761 | Human Rab4b protein sequence | 6 . . . 218 | 183/213 (85%) | e−103 |
| | SEQ ID NO: 4-Homo sapiens, 213 | 1 . . . 213 | 195/213 (90%) | |
| | aa. [CN1257124-A, 21 Jun. 2000] | | | |
| AAU17547 | Novel signal transduction pathway | 11 . . . 218 | 182/208 (87%) | e−103 |
| | protein, Seq ID 1112-Homo sapiens, | 15 . . . 222 | 193/208 (92%) | |
| | 222 aa. [WO200154733-A1, | | | |
| | 2 Aug. 2001] | | | |
| AAU17127 | Novel signal transduction pathway | 11 . . . 218 | 182/208 (87%) | e−103 |
| | protein, Seq ID 692-Homo sapiens, | 18 . . . 225 | 193/208 (92%) | |
| | 225 aa. [WO200154733-A1, | | | |
| | 2 Aug. 2001] | | | |

[0330] In a BLAST search of public sequence databases, the NOV2a protein was found to have homology to the proteins shown in the BLASTP data in Table 2E.

TABLE 2E
Public BLASTP Results for NOV2a

| | | NOV2a | | |
|---|---|---|---|---|
| Protein | | Residues/ | Identities/ | |
| Accession | | Match | Similarities for the | Expect |
| Number | Protein/Organism/Length | Residues | Matched Portion | Value |
| Q9BQ44 | RAB4, member RAS oncogene family- | 1 . . . 218 | 218/218 (100%) | e−123 |
| | Homo sapiens (Human), 218 aa. | 1 . . . 218 | 218/218 (100%) | |
| P20338 | Ras-related protein Rab-4A-Homo | 6 . . . 218 | 211/213 (99%) | e−119 |
| | sapiens (Human), 213 aa. | 1 . . . 213 | 212/213 (99%) | |
| P56371 | Ras-related protein Rab-4A-Mus | 6 . . . 218 | 208/213 (97%) | e−118 |
| | musculus (Mouse), 213 aa. | 1 . . . 213 | 212/213 (98%) | |
| P05714 | Ras-related protein Rab-4A-Rattus | 6 . . . 218 | 208/213 (97%) | e−117 |
| | norvegicus (Rat), 213 aa. | 1 . . . 213 | 210/213 (97%) | |
| Q9H0Z8 | DJ803J11.1 (RAB4, member RAS | 16 . . . 218 | 198/203 (97%) | e−109 |
| | oncogene family)-Homo sapiens | 1. . . 198 | 198/203 (97%) | |
| | (Human), 198 aa (fragment). | | | |

[0331] PFam analysis predicts that the NOV2a protein contains the domains shown in the Table 2F.

TABLE 2F
Domain Analysis of NOV2a

| | | Identities/ | |
|---|---|---|---|
| Pfam | | Similarities for | Expect |
| Domain | NOV2a Match Region | the Matched Region | Value |
| Arf | 5 . . . 177 | 37/199 (19%) | 1.2e−05 |
| | | 106/199 (53%) | |
| Ras | 15 . . . 218 | 88/217 (41%) | 4.1e−91 |
| | | 172/217 (79%) | |

### Example 3

[0332] The NOV3 clone was analyzed, and the nucleotide and encoded polypeptide sequences are shown in Table 3A.

TABLE 3A
NOV3 Sequence Analysis

| | SEQ ID NO:9 | 1185 bp |
|---|---|---|
| NOV3a | GTAATATCCTCTCTCCCCCAGATATTAGGAACAGTATCACAGGGGGTGGTACACTCCC | |
| CG112785-01 | TTAGATATTGGGAGTAATATCATCCTCTTGCCTTCTGGATATTAGGAACAATATCCCA | |
| DNA | GAAGGCGTGTACAACCCCCTGCGATACTGGGAGACAGCCCGTCCTCACTGGGCTCTCC | |
| Sequence | CTGTCCATGTACCTGGTCACGATGCTGAGGAACCTGTTCATCATCCTGGCTGGCAGCT | |
| | CTGACCCCCACTTCCACACCCCCATGTACTTCTTCCTCTCCAACCTGTCCTGGGCTGA | |
| | CATTGGTTTCACCTCGGCCACAGTTCCCAAGATGATTGTGGACATGCAGTCGCATAGC | |
| | AGAGTCATCTCTTATGCGGGCTGCCTGACACAGATGTCTTTCTTTGTCCTTTTTGCAT | |
| | GTATAGAAGACATGCTCCTGACTCTGATGGCCTATGACCGATTTGTGGCCATCTGCCA | |
| | CCCCCTGCACTACCGAGTCATCATGAATCCTCACCTCTGTGTCTTCTTAGTTTTGGTG | |
| | TCCTTTTTCCTTAGCCTGTTGGATTCCCAGCTGCACAGCTGGATTGTGTTACAACTCA | |
| | CCTTCTTCAAGAATGTGGAAATCTATAATTTTTTCTGTGACCCATCTCAACTTCTCAA | |
| | TTTGGTTTTCTTCCCATTTCAGGGATCCTTTTGTCTTACTATAAAATTGTCTCCTCCA | |
| | TTCCAAGAATTCCATCGTCAGATGGGAAGTATAAAGCCTTCTCCACCTGTGGCTCTCA | |
| | CCTGGCAGTTGTTTGCTTATTTTATGAAACAGGCATTGGCGTGTACCTGACTTCAGCT | |
| | GTGTCATCATCTCCCAGGAATGGAGTGGTGGCATCAGTGATGTACGCTGTGGTCATCC | |
| | CCATGCTGAACCCTTTCATCTACAGCCTGAGAAACAGGGACATTCATAGTGCCCTGTG | |
| | GAGGCTGCGCAGCAGAACAGTCAAATCTCATGATCTGTTCCATCCTTTCTCTTGTGTG | |
| | AGTAAGAAAGGGCAACCACATTAAATCTGTACATCTGCAAATCCTAACCCCTTTGTCA | |
| | CATTATTTTTGTTGCTTGATGGTTTTATTCCTTTCCACATTTCCTATGTGAATTGCTT | |
| | CTTTGTTATGCCTTTAATGGAATGG | |
| | ORF Start: ATG at 181 | ORF Stop: TAA at 1066 |
| | SEQ ID NO:10 | 295 aa MW at 33372.9 kD |

| | |
|---|---|
| NOV3a, | MYLVTMLRNLFIILAGSSDPHFHTPMYFFLSNLSWADIGFTSATVPKMIVDMQSHSRV |
| CG112785-01 | ISYAGCLTQMSFFVLEACIEDMLLTLMAYDRFVAICHPLHYRVTMNPHLCVFLVLVSF |
| Protein | FLSLLDSQLHSWIVLQLTPFKNVEIYNFFCDPSQLLNLACSDSIINNILCILDIPTFG |
| Sequence | FLPISGTLLSYYKIVSSIPRIPSSDGKYKAFSTCGSHLAVVCLFYETGIGVYLTSAVS |
| | KGQPH |

[0333] Further analysis of the NOV3a protein yielded the following properties shown in Table 3B.

TABLE 3B
Protein Sequence Properties NOV3a

| | |
|---|---|
| PSort | 0.6850 probability located in endoplasmic reticulum |
| analysis: | (membrane); 0.6400 probability located in plasma |
| | membrane; 0.4600 probability located in Golgi body; |
| | 0.1000 probability located in endoplasmic reticulum (lumen) |
| SignalP | Cleavage site between residues 19 and 20 |
| analysis: | |

[0334] A search of the NOV3a protein against the Geneseq database, a proprietary database that contains sequences published in patents and patent publication, yielded several homolgous proteins shown in Table 3C.

TABLE 3C
Geneseq Results for NOV3a

| | | NOV3a | | |
|---|---|---|---|---|
| | Protein/Organism/ | Residues/ | Identities/ | |
| Geneseq | Length [Patent #, | Match | Similarities for the | Expect |
| Identifier | Date] | Residues | Matched Region | Value |
| AAG72265 | Human olfactory receptor polypeptide, | 1 . . . 286 | 275/290 (94%) | e−156 |
| | SEQ ID NO: 1946-Homo sapiens, 291 | 2 . . . 291 | 278/290 (95%) | |
| | aa. [WO200127158-A2, 19 Apr. 2001] | | | |
| ABG15327 | Novel human diagnostic protein #15318- | 3 . . . 295 | 257/298 (86%) | e−143 |
| | Homo sapiens, 345 aa. [WO200175067- | 48 . . . 345 | 264/298 (88%) | |
| | A2, 11 Oct. 2001] | | | |
| ABG15327 | Novel human diagnostic protein #15318- | 3 . . . 295 | 257/298 (86%) | e−143 |
| | Homo sapiens, 345 aa. [WO200175067- | 48 . . . 345 | 264/298 (88%) | |
| | A2, 11 Oct. 2001] | | | |
| AAU85171 | G-coupled olfactory receptor #32-Homo | 1 . . . 295 | 256/300 (85%) | e−142 |
| | sapiens, 300 aa. [WO200198526-A2, | 1 . . . 300 | 263/300 (87%) | |
| | 27 Dec. 2001] | | | |
| AAE04583 | Human G-protein coupled receptor-39 | 1 . . . 295 | 256/300 (85%) | e−142 |
| | (GCREC-39) protein-Homo sapiens, | 60 . . . 359 | 263/300 (87%) | |
| | 2001] | | | |

[0335] In a BLAST search of public sequence databases, the NOV3a protein was found to have homology to the proteins shown in the BLASTP data in Table 3D.

TABLE 3D
Public BLASTP Results for NOV3a

| | | NOV3a | | |
|---|---|---|---|---|
| Protein | | Residues/ | Identities/ | |
| Accession | | Match | Similarities for | Expect |
| Number | Protein/Organism/Length | Residues | the Matched Portion | Value |
| Q8VFJ2 | Olfactory receptor MOR145-1- | 1 . . . 276 | 196/276 (71%) | e−112 |
| | Mus musculus (Mouse), 295 aa. | 20 . . . 295 | 228/276 (82%) | |
| O43789 | Olfactory receptor-Homo sapiens | 25 . . . 285 | 200/261 (76%) | e−112 |
| | (Human), 264 aa (fragment). | 1 . . . 260 | 224/261 (85%) | |
| Q9UPJ1 | BC319430_5-Homo sapiens | 26 . . . 285 | 199/260 (76%) | e−111 |
| | (Human), 263 aa. | 1 . . . 259 | 223/260 (85%) | |
| Q8VF19 | Olfactory receptor MOR145-3- | 2 . . . 276 | 178/275 (64%) | e−102 |
| | Mus musculus (Mouse), 295 aa. | 21 . . . 295 | 215/275 (77%) | |
| Q8VFJ0 | Olfactory receptor MOR145-2- | 1 . . . 274 | 183/274 (66%) | e−101 |
| | Mus musculus (Mouse), 319 aa. | 44 . . . 317 | 217/274 (78%) | |

[0336] PFam analysis predicts that the NOV3a protein contains the domains shown in the Table 3E.

TABLE 3E
Domain Analysis of NOV3a

| | | Identities/ | |
|---|---|---|---|
| Pfam | | Similarities for | Expect |
| Domain | NOV3a Match Region | the Matched Region | Value |
| 7tm_1 | 8 . . . 257 | 57/277 (21%) | 7.1e−31 |
| | | 186/277 (67%) | |

### Example 4

[0337] The NOV4 clone was analyzed and the nucleotide and encoded polypeptide sequences are shown in Table 4A.

TABLE 4A
NOV4 Sequence Analysis

| | SEQ ID NO:11 | 700 bp |
|---|---|---|
| NOV4a, | CTCTAATATGATTCCACCTGTTGGGCTCTTTCTTCCATTTGCCTCCGCAGATAGTGTC | |
| CG116818-02 | TGCCTTCTGGAGAGCTGACCAAACACTAAGGATGCTGAAGTTCCGAACAGTCCATGGG | |
| DNA | GGCCTGAGGCTCCTGGGAATCCGCCGAACCTCCACCGCCCCCGCTGCCTCCCCAAATG | |
| Sequence | TCCGGCGCCTGGAGTATAAGCCCATCAAGAAGTCATGGTGGCCAAACAGAGGTGAGAT | |
| | TGCCATCCGTGTGTTCCGGGCCTGCACGGAGCTGGGCATCCGCACCGTAGCCATCTAC | |
| | TCTGAGCAGGACACGGGCCAGATGCACCGGCAGAAAGCAGATGAAGCCTATCTCATCG | |
| | GCCGCGGCCTGGCCCCCGTGCAGGCCTACCTGCACATCCCAGACATCATCAAGGTGGC | |
| | CAAGGAGAACAACGTAGATGCAGTGCACCCTGGCTACGGGTTCCTTTCTGAGCGAGCG | |
| | AAGGTGATAGACATCAAAGTGGTGGCAGGGGCCAAGGTGGCCAAGGGCCAGCCCCTGT | |
| | GTGTGCTCAGTGCCATGAAGATGGAGACTGTGGTGACCTCACCCATGGAGGGTACTGT | |
| | CCGCAAGGTTCATGTGACCAAGGACATGACACTGGAAGGTGACGACCTCATCCTGGAG | |
| | ATCGAGTGATCTTGCCCCAGACCGGCAGCCTGGCCATCCCCAAGCCTTCAACAGAAGC | |
| | TGTG | |
| | ORF Start: ATG at 90 | ORF Stop: TGA at 645 |
| | SEQ ID N0:12 | 185 aa MW at 20387.8 kD |

| | |
|---|---|
| NOV4a, | MLKFRTVHGGLRLLGIRRTSTAPAASPNVRRLEYKRIKKVMVIAARGETAIRVFRACTE |
| CG116818-02 | LGIRTVAIYSEQDTGQMHRQKADEAYLIGRGLAPVQAYLHIPDITKVAKENNVDAVHP |
| Protein | GYGFLSERAKVIDTKVVAGAKVAKGQPLCVLSAAKMETAATSPMEGTVRKVHVTKDMT |
| Sequence | LEGDDLILETE |

[0338] Further analysis of the NOV4a protein yielded the following properties shown in Table 4B.

TABLE 4B
Protein Sequence Properties NOV4a

| | |
|---|---|
| PSort | 0.5964 probability located in mitochondrial matrix space; |
| analysis: | 0.3037 probability located in mitochondrial inner membrane; |
| | 0.3037 probability located in mitochondrial intermembrane |
| | space; 0.3037 probability located in mitochondrial outer |
| | membrane |
| SignalP | Cleavage site between residues 22 and 23 |
| analysis: | |

[0339] A search of the NOV4a protein against the Geneseq database a proprietary database that contains sequences published in patents and patent publication yielded several homologous proteins shown in Table 4C.

TABLE 4C
Geneseq Results for NOV4a

| | | | Identities/ | |
|---|---|---|---|---|
| | | | Similari- | |
| | | NOV4a | ties | |
| | Protein/ | Residues/ | for the | |
| Geneseq | Organism/Length | Match | Matched | Expect |
| Identifier | [Patent #, Date] | Residues | Region | Value |
| ABB67309 | Drosophila | 31 . . . 143 | 74/113 | 4e−39 |
| | melanogaster | 33 . . . 145 | (65%) | |
| | polypeptide SEQ | | 94/113 | |
| | ID NO 28719 - | | (82%) | |
| | Drosophila | | | |
| | melanogaster, | | | |
| | 1196 aa. | | | |
| | [WO200171042-A2, | | | |
| | 27 SEP. 2001] | | | |
| ABB66605 | Drosophila | 31 . . . 143 | 74/113 | 4e−39 |
| | melanogaster | 33 . . . 145 | (65%) | |
| | polypeptide SEQ | | 94/113 | |
| | ID NO 26607 - | | (82%) | |
| | Drosophila | | | |
| | melanogaster, | | | |
| | 1181 aa. | | | |
| | [WO200171042-A2, | | | |
| | 27 SEP. 2001] | | | |
| ABB66604 | Drosophila | 31 . . . 143 | 74/113 | 4e−39 |
| | melanogaster | 33 . . . 145 | (65%) | |
| | polypeptide SEQ | | 94/113 | |
| | ID NO 26604 - | | (82%) | |
| | Drosophila | | | |
| | melanogaster, | | | |
| | 1181 aa. | | | |
| | [WO200171042-A2, | | | |
| | 27 SEP. 2001] | | | |
| ABB58211 | Drosophila | 31 . . . 143 | 74/113 | 4e−39 |
| | melanogaster | 33 . . . 145 | (65%) | |
| | polypeptide SEQ | | 94/113 | |
| | ID NO 1425 - | | (82%) | |
| | Drosophila | | | |
| | melanogaster, | | | |
| | 1181 aa. | | | |
| | [WO200171042-A2, | | | |
| | 27 SEP. 2001] | | | |
| AAU00511 | Bacillus subtilis | 32 . . . 123 | 63/92 | 1e−31 |
| | pyruvate | 1 . . . 92 | (68%) | |
| | carboxylase | | 75/92 | |
| | enzyme A - | | (81%) | |
| | Bacillus subtilis | | | |
| | strain 168, 1148 aa. | | | |
| | [EP1092776-A1, | | | |
| | 18 APR. 2001] | | | |

[0340] In a BLAST search of public sequence databases, the NOV4a protein was found to have homology to the proteins shown in the BLASTP data in Table 4D.

TABLE 4D
Public BLASTP Results for NOV4a

| | | | Identities/ | |
|---|---|---|---|---|
| | | NOV4a | Similarities | |
| Protein | | Residues/ | for the | |
| Accession | Protein/ | Match | Matched | Expect |
| Number | Organism/Length | Residues | Portion | Value |
| JC2460 | pyruvate carboxylase | 1 . . . 143 | 128/143 (89%) | 3e−66 |
| | (EC 6.4.1.1) | 1 . . . 143 | 129/143 (89%) | |
| | precursor - human, | | | |
| | 1178 aa. | | | |
| P11898 | Pyruvate carboxylase, | 1 . . . 143 | 128/143 (89%) | 3e−66 |
| | mitochondrial | 1 . . . 143 | 129/143 (89%) | |
| | precursor (EC 6.4.1.1) | | | |
| | (Pyruvic carboxylase) | | | |
| | (PCB) - Homo sapiens | | | |
| | (Human), 1178 aa. | | | |
| JC4391 | pyruvate carboxylase | 1 . . . 143 | 121/143 (84%) | 5e−63 |
| | (EC 6.4.1.1) | 1 . . . 143 | 126/143 (87%) | |
| | precursor - rat, | | | |
| | 1178 aa. | | | |
| P52873 | Pyruvate carboxylase, | 1 . . . 143 | 121/143 (84%) | 5e−63 |
| | mitochondrial | 1 . . . 143 | 126/143 (87%) | |
| | precursor | | | |
| | (EC 6.4.1.1) | | | |
| | (Pyruvic carboxylase) | | | |
| | (PCB) - Rattus | | | |
| | norvegicus (Rat), | | | |
| | 1178 aa | | | |
| Q05920 | Pyruvate carboxylase, | 1 . . . 143 | 120/143 (83%) | 2e−62 |
| | mitochondrial | 1 . . . 143 | 126/143 (87%) | |
| | precursor | | | |
| | (EC 6.4.1.1) | | | |
| | (Pyruvic carboxylase) | | | |
| | (PCB) - Mus | | | |
| | musculus (Mouse), | | | |
| | 1178 aa. | | | |

[0341] PFam analysis predicts that the NOV4a protein contains the domains shown in the Table 4E.

TABLE 4E
Domain Analysis of NOV4a

| | | Identities/ | |
|---|---|---|---|
| | NOV4a | Similarities | Expect |
| Pfam Domain | Match Region | for the Matched Region | Value |
| CPSase_L_chain | 36 . . . 123 | 38/101 (38%) | 3.5e−29 |
| | | 73/101 (72%) | |
| biotin_lipoyl | 111 . . . 184 | 24/75 (32%) | 1.1e−16 |
| | | 60/75 (80%) | |

### Example 5

[0342] The NOV5 clone was analyzed, and the nucleotide and encoded polypeptide sequences are shown in Table 5A.

TABLE 5A
NOV5 Sequence Analysis

| | SEQ ID NO:13 | 2133 bp |
|---|---|---|
| NOV5a, | GAATTCCGGTTTCTTCCTAAAAAATGTCTGATGGCCGCTTTCTCGGTCGGCACCGCCA | |
| CG117653-02 | AATGAATGCCAGCAGTTACTCTGCAGAGATGACGGAGCCCAAGTCGGTGTGTGTCTCGGT | |
| DNA | GGATGAGGTGGTGTCCAGCAACATGGAGGCCACTGAGACGGACCTGCTGAATGGACAT | |
| Sequence | CTGAAAAAAGTAGATAATAACCTCACGGAAGCCCAGCGCTTCTCCTCCTTGCCTCGGA | |
| | GGGCAGCTGTGAACATTGAATTCAGGGACCTTTCCTATTCGGTTCCTGAAGGACCCTG | |
| | GTGGAGGAAGAAAGGATACAAGACCCTCCTGAAAGGAATTTCCGGGAAGTTCAATAGT | |
| | GGTGAGTTGGTGGCCATTATGGGTCCTTCCGGGGCCGGGAAGTCCACGCTGATGAACA | |
| | TCCTGGCTGGATACAGGGAGACGGGCATGAAGGGGGCCGTCCTCATCAACGGCCTGCC | |
| | CCGGGACCTGCGCTGCTTCCGGAAGGTGTCCTGCTACATCATGCAGGATGACATGCTG | |
| | CTGCCGCATCTCACTGTGCAGGAGGCCATGATGGTGTCGGCACATCTGAAGCTTCAGG | |
| | AGAAGGATGAAGGCAGAAGGGAAATGGTCAAGGAGATACTGACAGCGCTGGGCTTGCT | |
| | GTCTTGCGCCAACACGCGGACCGGGAGCCTGTCAGGTGGTCAGCGCAAGCGCCTGGCC | |
| | ATCGCGCTGGAGCTGGTGAACAACCCTCCAGTCATGTTCTTCGATGAGCCCACCAGCG | |
| | GCCTGGACAGCGCCTCCTGCTTCCAGGTGGTCTCGCTGATGAAAGGGCTCGCTCAAGG | |
| | GGGTCGCTCCATCATTTGCACCATCCACCAGCCCAGCGCCAAACTCTTCGAGCTGTTC | |
| | GACCAGCTTTACGTCCTGAGTCAAGGACAATGTGTGTACCGGGGAAAAGTCTGCAATC | |
| | TTGTGCCATATTTGAGGGATTTGGGTCTGAACTGCCCAACCTACCACAACCCAGCAGA | |
| | TTTTGTCATGGAGGTTGCATCCGGCGAGTACGGTGATCAGAACAGTCGGCTGGTGAGA | |
| | GCGGTTCGGGAGGGCATGTGTGACTCAGACCACAAGAGAGACCTCGGGGGTGATGCCG | |
| | AGGTGAACCCTTTTCTTTGGCACCGCCCCTCTGAAGAGGTAAAGCAGACAAAACGATT | |
| | AAAGGGGTTGAGAAAGGACTCCTCGTCCATGGAAGGCTGCCACAGCTTCTCTGCCAGC | |
| | TGCCTCACGCAGTTCTGCATCCTCTTCAAGAGGACCTTCCTCAGCATCATGAGGGACT | |
| | CGGTCCTGACACACCTGCGCATCACCTCGCACATTGGGATCGGCCTCCTCATTGGCCT | |
| | GCTGTACTTGGGGATCGGGAACGAAACCAAGAAGGTCTTGAGCAACTCCGGCTTCCTC | |
| | TTCTTCTCCATGCTGTTCCTCATGTTCGCGGCCCTCATGCCTACTGTTCTGACATTTC | |
| | CCCTGGAGATGGGAGTCTTTCTTCGGGAACACCTGAACTACTGGTACAGCCTGAAGGC | |
| | CTACTACCTGGCCAAGACCATGGCAGACGTGCCCTTTCAGATCATGTTCCCAGTGGCC | |
| | TACTGCAGCATCGTGTACTGGATGACGTCGCAGCCGTCCGACGCCGTGCGCTTTGTGC | |
| | TGTTTGCCGCGCTGGGCACCATGACCTCCCTGGTGGCACAGTCCCTGGGCCTGCTGAT | |
| | CGGAGCCGCCTCCACGTCCCTGCAGGTGGCCACTTTCGTGGGCCCAGTGACAGCCATC | |
| | CCGGTGCTCCTGTTCTCGGGGTTCTTCGTCAGCTTCGACACCATCCCCACGTACCTAC | |
| | AGTGGATGTCCTACATCTCCTATGTCAGGTAGCGGGCGTGGGGCACGCATGGCGTGGG | |
| | GACCGAGCGTGACGGGGGAAGAACCGTCTCCAACAGCGTGAGGGGCTCACAAAAGCCA | |
| | CTCTGGGCTGCTGGCCAAGAGCAGATTACACATCTGAGGATCCAGGCCTTCCATCTTC | |
| | CTGCTAGTTCCACCTCCTCCTACCCTCACCAACACACACACACTAAACAAGGAGGCCA | |
| | CACAAACCAGCGCTTCACACCCGGAGAGCCATGGCAGGACCAAGTGTTCTGGACGTTG | |
| | CCGAGAGCTGCCTTTGGTGGAAGCGCTTCCATCTTTTACGAACGT | |
| | ORF Start: ATG at 31 | ORF Stop: TAG at 1828 |
| | SEQ ID NO:14 | 599 aa MW at 66330.4 kD |

| | |
|---|---|
| NOV5a, | MAAPSVGTAMNASSYSAEMTEPKSVCVSVDEVVSSNMEATETDLLNGHLKKVIDNNLTE |
| CG117653-02 | AQRFSSLPRRAAVNTEFRDLSYSVPEGPWWRKKGYKTLLKGISGKFNSGELVAIMGPS |
| Protein | GAGKSTLMNILAGYRETGMKGAVLINGLPRDLRCFRKVSCYIMQDDMLLPHLTVQEAM |
| Sequence | MVSAHLKLQEKDEGRREMVKETLTALGLLSCAATRTGSLSGGQRKRLATALELVNNPP |
| | AAVMFFDEPTSGLDSASCFQVVSLMKGLAQGGRSITCTTHQRSAKLPELFDQLYVLSQGQ |
| | CVYRGKVCNLVPYLRDLGLNCPTYHNPADFVMEVASGEYGDQNSRLVRAVREGMCDSD |
| | HKRDLGGDAEVNPFLWHRPSEEVKQTKRLKGLRKDSSSMEGCHSFSASCLTQFCILFK |
| | RTFLSIMRDSVLTHLRTTSHIGTGLLIGLLYLGIGNETKKVLSNSGFLFFSMLFLMFA |
| | ALMPTVLTFPLEMGVFLREHLNYWYSLKAYYLAKTMADVPFQIMPPVAYCSIVYWMTS |
| | QPSDAVRPVLFAALGTMTSLVAQSLGLLIGAASTSLQVATFVGPVTAIPVLLFSGFFV |
| | ISFDTTPTYLQWMSYISYVR |

[0343] Further analysis of the NOV5a protein yielded the following, properties shown in Table 5B.

TABLE 5B
Protein Sequence Properties NOV5a

| | |
|---|---|
| PSort | 0.6000 probability located in plasma membrane; 0.5876 |
| analysis: | probability located in mitochondrial inner membrane; 0.4000 |
| | probability located in Golgi body; 0.3000 probability located |
| | in endoplasmic reticulum (membrane) |
| SignalP | No Known Signal Sequence Predicted |
| analysis: | |

[0344] A search of the NOV5a protein against the Geneseq database, a proprietary database that contains sequences published in patents and patent publication, yielded several homologous proteins shown in Table 5C.

TABLE 5C
Geneseq Results for NOV5a

| | | | Identities/ | |
|---|---|---|---|---|
| | | | Similari- | |
| | | NOV5a | ties | |
| | Protein/ | Residues/ | for the | |
| Geneseq | Organism/Length | Match | Matched | Expect |
| Identifier | [Patent #, Date] | Residues | Region | Value |
| ABB57112 | Mouse ischaemic | 1 . . . 599 | 566/599 | 0.0 |
| | condition related | 5 . . . 591 | (94%) | |
| | protein sequence | | 577/599 | |
| | SEQ ID NO. 255 - | | (95%) | |
| | Mus musculus, | | | |
| | 666 aa. | | | |
| | [WO200188188-A2, | | | |
| | 22 NOV. 2001] | | | |
| AAO14186 | Human transporter | 38 . . . 599 | 406/562 | 0.0 |
| | and ion channel | 26 . . . 572 | (72%) | |
| | TRICH-3 - Homo | | 465/562 | |
| | sapiens, 646 aa. | | (82%) | |
| | [WO200204520-A2, | | | |
| | 17 JAN. 2002] | | | |
| ABB61867 | Drosophila | 58 . . . 599 | 243/550 | e−125 |
| | melanogaster | 90 . . . 614 | (44%) | |
| | polypeptide | | 343/550 | |
| | SEQ ID | | (62%) | |
| | NO 12393 - | | | |
| | Drosophila | | | |
| | melanogaster, | | | |
| | 689 aa. | | | |
| | [WO200171042-A2, | | | |
| | 27 SEP. 2001] | | | |
| AAM00994 | Human bone | 92 . . . 418 | 221/327 | e−119 |
| | marrow | 19 . . . 322 | (67%) | |
| | protein, SEQ ID | | 255/327 | |
| | NO: 495 - | | (77%) | |
| | Homo sapiens, | | | |
| | 935 aa. | | | |
| | [WO200153453-A2, | | | |
| | 26 JUL. 2001] | | | |
| ABB59648 | Drosophila | 190 . . . 599 | 213/412 | e−116 |
| | melanogaster | 150 . . . 546 | (51%) | |
| | polypeptide | | 291/412 | |
| | SEQ ID NO 5736 - | | (69%) | |
| | Drosophila | | | |
| | A2, 27 SEP. 2001] | | | |

[0345] In a BLAST search of public sequence databases, the NOV5a protein was found to have homology to the proteins shown in the BLASTP data in Table 5D.

TABLE 5D
Public BLASTP Results for NOV5a

| | | | Identities/ | |
|---|---|---|---|---|
| | | NOV5a | Similarities | |
| Protein | | Residues/ | for the | |
| Accession | Protein/ | Match | Matched | Expect |
| Number | Organism/Length | Residues | Portion | Value |
| P45844 | ATP-binding | 1 . . . 599 | 598/599 (99%) | 0.0 |
| | cassette, sub- | 5 . . . 603 | 598/599 (99%) | |
| | family G, | | | |
| | member 1 (White | | | |
| | protein homolog) | | | |
| | (ATP-binding | | | |
| | cassette | | | |
| | transporter 8) - | | | |
| | Homo sapiens | | | |
| | (Human), 678 aa. | | | |
| AAH29158 | Hypothetical 73.7 | 1 . . . 599 | 586/599 (97%) | 0.0 |
| | kDa protein - | 1 . . . 587 | 586/599 (97%) | |
| | Homo sapiens | | | |
| | (Human), 662 aa. | | | |
| Q9EPG9 | ABC transporter, | 1 . . . 599 | 566/599 (94%) | 0.0 |
| | white | 5 . . . 591 | 578/599 (96%) | |
| | homologue - | | | |
| | Rattus norvegicus | | | |
| | (Rat), 666 aa. | | | |
| Q64343 | ATP-binding | 1 . . . 599 | 566/599 (94%) | 0.0 |
| | cassette, | 5 . . . 591 | 577/599 (95%) | |
| | sub-family G, | | | |
| | member 1 | | | |
| | (White protein | | | |
| | homolog) | | | |
| | (ATP-binding | | | |
| | cassette | | | |
| | transporter 8)- | | | |
| | Mus musculus | | | |
| | (Mouse), 666 aa. | | | |
| G02068 | white homolog - | 37 . . . 599 | 561/563 (99%) | 0.0 |
| | human, 638 aa. | 1 . . . 563 | 561/563 (99%) | |

[0346] PFam analysis predicts that the NOV5a protein contains the domains shown in the Table 5E.

TABLE 5E
Domain Analysis of NOV5a

| | | Identities/ | |
|---|---|---|---|
| | NOV5a | Similarities | Expect |
| Pfam Domain | Match Region | for the Matched Region | Value |
| PRK | 109 . . . 124 | 7/16 (44%) | 0.37 |
| | | 13/16 (81%) | |
| GBP | 110 . . . 129 | 13/20 (65%) | 0.11 |
| | | 16/20 (80%) | |
| ABC_tran | 107 . . . 289 | 70/201 (35%) | 1.9e−41 |
| | | 143/201 (71%) | |

### Example 6

[0347] The NOV6 clone was analyzed, and the nucleotide and encoded polypeptide sequences are shown in Table 6A.

TABLE 6A
NOV6 Sequence Analysis

| | SEQ ID NO:15 | 1940 bp |
|---|---|---|
| NOV6a, | CCAGAGAGTCTGTGTGAGATGAAGACAGAGGCCCAGCCTTCGACATCCTTGCTGGCAA | |
| CG119674-02 | ACACCTCATGGACTGGCACAGTGATTTCTGACAGTGTCCCAGGAAGTCAAACGTGGGA | |
| DNA | AGACAAGGGTTCATTGACCCGGCCTGCAACATCTCGGACCTCAGAGGCCCAAGTTTCA | |
| Sequence | GCAGCCCGGGTTGCAGAGGCTCAGGCCAGGACCAGTCAGCCCAAGCAAATTTCTGTAT | |
| | TGGAGGCGTTAACTGCCTCAGCCCTGAACCAGAAACCCACGCATGAGAAGGTGCAGAT | |
| | GACAGAGAAGAAAGAGAGTGAGGCAGTTTCGCTGCCATCTACATCTTCATGCTGTTCC | |
| | TGGTCGGGGTTCCTCTTCTCTTCCTGGAGATGGCAGCTGGTCAGAGCATGCGTCAGGG | |
| | TGGCATGGGTGTATGGAAGATCATTGCCCCCTGGATTGGTGGTGTGGGGTATTCTAGC | |
| | TTCATGGAATGCTGAAATACTTTTAAAGCTGATAAACCTAGGGAAACTGCCTCCTGAT | |
| | GCCAAGCCCCCTGTCAACCTGCTTTACAACCCAACCTCCATCTACAATGCCTGGCTCA | |
| | GTGGCCTTCCCCAGCACATCAAAAGCATGGTTCTCCGCGAGGTGACTGAGTGCAACAT | |
| | AGAGACTCAGTTTCTTAAGGCTAGCGAGGGCCCAAAGTTTGCATTCCTGTCCTTTGTT | |
| | GAAGCCATGTCCTTCCTTCCTCCGTCTGTCTTCTGGTCTTTTATCTTCTTCCTGATGT | |
| | TGCTGGCCATGGGGCTGAGCAGCGCAATAGGGATTATGCAGGGCATCATTACTCCACT | |
| | CCAGGACACCTTCTCTTTCTTCAGGAAACATACAAAGCTGCTCATAGTGGGAGTCTTT | |
| | TTGCTCATGTTCGTGTGCGGCCTCTTCTTCACTCGACCTTCAGGCAGCTACTTCATCA | |
| | GACTGCTGAGTGACTACTGGATAGTCTTCCCCATCATCGTCGTTGTCGTATTTGAAAC | |
| | CATGGCTGTATCCTGGGCCTATGGGGCCAGGAGGTTCCTTGCAGACCTGACGATCCTG | |
| | TTGGGCCACCCCATCTCTCCCATCTTTGGTTGGCTGTGGCCCCATCTGTGTCCAGTTG | |
| | TGCTGCTAATCATCTTTGTGACCATGATGGTTCATCTTTGTATGAAGCCGATTACCTA | |
| | CATGTCCTGGGACTCAAGCACCTCPAAAGAGGTGCTTCGACCATACCCACCGTGGGCA | |
| | CTGCTCTTGATGATCACCCTTTTTGCCATTGTCATCCTCCCCATCCCTGCATACTTTG | |
| | TATACTGCCGCATACATAGGATTCCCTTCAGGCCCAAGAGCGGAGACGGGCCTATGAC | |
| | AGCCTCCACATCCCTACCCCTAAGTCACCAGCTAACACCCAGTAAAGAGGTTCAAAAG | |
| | GAAGAAATTCTACAAGTTGATGAAACAAAGTACCCATCAACTTGTAATGTGACTTCCT | |
| | AACTTCATTAATTTGGCTTCACATAACATATCCCTTAGAACAGATCCAATAGACAACT | |
| | CTTAATATCAGCTTGCAACTGTTGATCTCCCTGGATCCAGAACCACTTTTATTTCCAA | |
| | GAGGAGGGGCATTCTTTGGGGCTGTTCATGGGGCCTGGACTTGCAATCCCTTCCTGGG | |
| | TCCCATCTTACCTGGTGACCACCATCATTGTTTTCCCCATCCTCTTCCTCAACACACA | |
| | TACATGCACAACACATATACAATACTAGTGATGTCTACCAGTCCTGCTACTTCTGGGG | |
| | TGCCTGTCTCCTGGAATGGAGCTGGAGGAGCAATGCTGTTGGTGAATAAATCAGTCTA | |
| | CTGGAACTCCAAGGACTGGATGTAAGCAGATCTTTTTTTCCTATAGATGTCTCAGATG | |
| | TTCAGTTTTCCTGTCACAAGGCTTCCAGTCTGTATTAGTTCATTTTCACACTGATAAT | |
| | ACAGACATACCTGAAACTGGGAAAAA | |
| | ORF Start: ATG at 19 | ORF Stop: TAA at 1450 |
| | SEQ ID NO:16 | 477 aa MW at 53345.0 kD |
| NOV6a, | MKTEAQPSTSLLANTSWTGTVISDSVPGSQTWEDKGSLTRPATSRTSEAQVSAARVAE | |
| CG119674-02 | AQARTSQPKQISVLEALTASALNQKRTHEKVQMTEKKESEAVSLPSTSSCCSWSGFLF | |
| Protein | SSWRWQLVPACVRVAWVYGRSLPRGLVVWGTLASWNAEILLKLINLGKLPPDAKPPVN | |
| Sequence | AALLYNPTSIYNAWLSGLPQHIKSMVLREVTECNIETQFLKASEGPKFAFLSFVEAMSFL | |
| | PPSVFWSFIFFLMLLAMGLSSAIGIMQGIITPLQDTFSFFRKRTKLLIVGVFLLMFVC | |
| | GLFFTRPSGSYFTRLLSDYWIVFPIIVVVVFETMAVSWAYGARRFLADLTILLGHPIS | |
| | PIFGWLWPHLCPVVLLIIFVTMMVHLCMKPITYMSWDSSTSKEVLRPYPPWALLLMITI | |
| | LFAIVTLPTPAYFVYCRIHRTPFRPKSGDGPMTASTSLPLSHQLTPSKEVQKEEILQV | |
| | DETKYPSTCNVTS | |
| | SEQ ID NO:17 | 1904 bp |
| NOV6b, | CCAGAGAGTCTGTGTGAGATGAAGACAGAGGCCCAGCCTTCGACATCCTTGCTGGCAA | |
| CG119674-03 | ACACCTCATCGACTGGCACAGTGATTTCTGACAGTGTCCCAGGAAGTCAAACGTGGGA | |
| DNA | AGACAAGGGTTCATTGACCCGGTCTGCAACATCTTGGACCTCAGAGGCCCAAGTTTCA | |
| Sequence | GCAGCCCGGGTTGCAGAGGCTCAGGCCAGGACCAGTCAGCCCAAGCAAATTTCTGTAT | |
| | TGGGCGCGTTAACTGCCTCAGCCCTGAACCAGAAACCCACGCATGAGAAGGTGCAGAT | |
| | GAGTATATTCTGGCTCAGGCAGTTTCGCTGCCATCTACATCTTCATGCTGTTCCTGGT | |
| | CGGGGTTCCTCTTCTCTTCCTGGAGATGGCAGCTGGTCAGAGCATGCGTCAGGGTGGC | |
| | ATGGGTGTATGGAAGATCATTGCCCCCTGGATTGGTGGTGTGGGGTATTCTAGCTTCA | |
| | TGGAATGCTGAAATACTTTTAAAGCTGATAAACCTAGGGAAACTGCCTCCTGATGCCA | |
| | AGCCCCCTGTCAACCTGCTTTACAACCCAACCTCCATCTACAATGCCTGGCTCAGTGG | |
| | CCTTCCCCAGCACATCAPAAGCATGGTTCTCCGCGAGGTGACTGAGTGCAACATAGAG | |
| | ACTCAGTTTCTTAAGGCTAGCGAGGGCCCAAAGTTTGCATTCCTGTCCTTTGTTGAAG | |
| | CCATGTCCTTCCTTCCTCCGTCTGTCTTCTGGTCTTTTATCTTCTTCCTGATGTTGCT | |
| | GGCCATGGGGCTGAGCAGCGCAATAGGGATTATGCAGGGCATCATTACTCCACTCCAG | |
| | GACACCTTCTCTTTCTTCAGGAAACATACAAAGCTGCTCATAGTGGGAGTCTTTTTGC | |
| | TCATGTTCGTGTGCGGCCTCTTCTTCACTCGACCTTCAGGCAGCTACTTCATCAGACT | |
| | GCTGAGTGACTACTGGATAGTCTTCCCCATCATCGTCGTTGTCGTATTTGAAACCATG | |
| | GCTGTATCCTGGGCCTATGGGGCCAGGAGGTTCCTTGCAGACCTGACGATCCTGTTGG | |
| | GCCACCCCATCTCTCCCATCTTTGGTTGGCTGTGGCCCCATCTGTGTCCAGTTGTGCT | |
| | GCTAATCATCTTTGTGACCATGATGGTTCATCTTTGTATGAAGCCGATTACCTACATG | |
| | TCCTGGGACTCAAGCACCTCAAAAGAGGTGCTTCGACCATACCCACCGTGGGCACTGC | |
| | TCTTGATGATCACCCTTTTTGCCATTGTCATCCTCCCCATCCCTGCATACTTTGTATA | |
| | CTGCCGCATACATAGGATTCCCTTCAGGCCCAAGAGCGGAGACGGGCCTATGACAGCC | |
| | TCCACATCCCTACCCCTAAGTCACCAGCTAACACCCAGTAAAGAGGTTCAAAAGGAAG | |
| | AAATTCTACAAGTTGATGAAACAAAGTACCCATCAACTTGTAATGTGACTTCCTAACT | |
| | TCATTAATTTGGCTTCACATAACATATCCCTTAGAACAGATCCAATAGACAACTCTTA | |
| | ATATCAGCTTGCAACTGTTGATCTCCCTGGATCCAGAACCACTTTTATTTCCAAGAGG | |
| | AGGGGCATTCTTTGGGGGTGTTCATGGGGCCTGGACTTGCAATCCCTTCCTGGGTCCC | |
| | ATCTTACCTGGTGACCACCATCATTGTTTTCCCCATCCTCTTCCTCAACACACATACA | |
| | TGCACAACACATATACAATACTAGTGATGTCTACCAGTCCTGCTACTTCTGGGGTGCC | |
| | TGTCTCCTGGAATGGAGCTGGAGGAGCAATGCTGTTGGTGAATAAATCAGTCTACTGG | |
| | AACTCCAAGGACTGGATGTAAGCAGATCTTTTTTTCCTATAGATGTCTCAGATGTTCA | |
| | GTTTTCCTGTCACAAGGCTTCCAGTCTGTATTAGTTCATTTTCACACTGATAATACAG | |
| | ACATACCTGAAACTGGGAAAAA | |
| | ORF Start: ATG at 19 | ORF Stop: TAA at 1504 |
| | SEQ ID NO:18 | 495 aa MW at 55397.4 kD |

| | |
|---|---|
| NOV6b, | MKTEAQPSTSLLANTSWTGTVISDSVRGSQTWEDKGSLTRSATSWTSEAQVSAARVAE |
| CG119674-03 | AAAQARTSQPKQTSVLGALTASALNQKPTHEKVQMTEKKESEVLLARPFWSSKTEYILAQ |
| Protein | AVSLPSTSSCCSWSGPLFSSWRWQLVRACVRVAWVYGRSLPPGLVVWGTLASWNAEIL |
| Sequence | AALKLINLGKLPPDAKPPVNLLYNPTSIYNAWLSGLPQHIKSMVLREVTECNIETQPLKA |
| | AASEGPKFAFLSFVEANSFLPPSVFWSFIFFLMLLAMGLSSAIGIMQGTITPLQDTPSFF |
| | IRKHTKLLIVGVFLLMFVCGLFFTRPSGSYFIRLLSDYWIVFPIIVVVVFETMAVSWAY |
| | AAGARRFLADLTILLGHPISPTFGWLWPHLCPVVLLIIPVTMMVHLCMKPITYMSWDSST |
| | ISKEVLRPYPPWALLLMITLPAIVILPIPAYFVYCRIRRIPFRPKSGDGPMTASTSLPL |

[0348] Sequence comparison of the above protein sequences yields the following, sequence relationships shown in Table 6B.

TABLE 6B
Comparison of NOV6a against NOV6b.

| | NOV6a Residues/ | Identities/Similarities |
|---|---|---|
| Protein Sequence | Match Residues | for the Matched Region |
| NOV6b | 1 . . . 477 | 451/495 (91%) |
| | 1 . . . 495 | 451/495 (91%) |

[0349] Further analysis of the NOV6a protein yielded the following, properties shown in Table 6C.

TABLE 6C
Protein Sequence Properties NOV6a

| | |
|---|---|
| PSort analysis: | 0.6000 probability located in plasma membrane; 0.4000 |
| | probability located in Golgi body; 0.3777 probability |
| | located in mitochondrial inner membrane; 0.3000 |
| | probability located in endoplasmic reticulum |
| | (membrane) |

[0350] Signal analysis: No Known Signal Sequence Predicted

[0351] A search of the NOV6a protein against the Geneseq database, a proprietary database that contains sequences published in patents and patent publication, yielded several homologous proteins shown in Table 6D.

TABLE 6D
Geneseq Results for NOV6a

| | | NOV6a | Identities/ | |
|---|---|---|---|---|
| | Protein/ | Residues/ | Similarities for | |
| Geneseq | Organism/Length | Match | the Matched | Expect |
| Identifier | [Patent #, Date] | Residues | Region | Value |
| ABG16783 | Novel human | 1 . . . 100 | 96/100 (96%) | 3e−46 |
| | diagnostic protein | 440 . . . 539 | 97/100 (97%) | |
| | #16774 - Homo | | | |
| | sapiens, 610 aa. | | | |
| | [WO200175067- | | | |
| | A2, | | | |
| | 11 OCT. 2001] | | | |
| ABG16783 | Novel human | 1 . . . 100 | 96/100 (96%) | 3e−46 |
| | diagnostic protein | 440 . . . 539 | 97/100 (97%) | |
| | #16774 - Homo | | | |
| | sapiens, 610 aa. | | | |
| | [WO200175067- | | | |
| | A2, | | | |
| | 11 OCT. 2001] | | | |
| AAE21800 | Human HIPHUM | 152 . . . 471 | 103/325 (31%) | 4e−44 |
| | 0000029 protein - | 370 . . . 682 | 166/325 (50%) | |
| | Homo sapiens, | | | |
| | 727 aa. | | | |
| | [GB2365432-A, | | | |
| | 20 FEB. 2002] | | | |
| ABB77168 | Human GABA | 152 . . . 427 | 92/278 (33%) | 5e−44 |
| | transporter | 371 . . . 645 | 153/278 (54%) | |
| | protein - Homo | | | |
| | sapiens, 730 aa. | | | |
| | [U.S. Pat. No. | | | |
| | 2002031800-A1, | | | |
| | 14 MAR. 2002] | | | |
| AAE14404 | Human | 152 . . . 427 | 92/278 (33%) | 5e−44 |
| | neurotransmitter | 371 . . . 645 | 153/278 (54%) | |
| | transporter, | | | |
| | NTT-2 - | | | |
| | Homo sapiens, | | | |
| | 730 aa. | | | |
| | [WO200190148- | | | |
| | A2, | | | |
| | 29 NOV. 2001] | | | |

[0352] In a BLAST search of public sequence databases, the NOV6a protein was found to have homolog,y to the proteins shown in the BLASTP data in Table 6E.

TABLE 6E
Public BLASTP Results for NOV6a

| | | | Identities/ | |
|---|---|---|---|---|
| | | NOV6a | Similarities | |
| Protein | | Residues/ | for the | |
| Accession | Protein/ | Match | Matched | Expect |
| Number | Organism/Length | Residues | Portion | Value |
| Q9GZN6 | Orphan sodium- | 152 . . . 477 | 326/326 (100%) | 0.0 |
| | and chloride- | 411 . . . 736 | 326/326 (100%) | |
| | dependent | | | |
| | neurotransmitter | | | |
| | transporter | | | |
| | NTT5 - Homo | | | |
| | sapiens (Human), | | | |
| | 736 aa. | | | |
| I52632 | sodium-dependent | 150 . . . 427 | 99/281 (35%) | 1e−45 |
| | neurotransmitter | 370 . . . 646 | 160/281 (56%) | |
| | transporter - | | | |
| | rat, 730 aa | | | |
| | (fragment). | | | |
| Q08469 | Orphan sodium- | 150 . . . 427 | 99/281 (35%) | 1e−45 |
| | and chloride- | 369 . . . 645 | 160/281 (56%) | |
| | dependent | | | |
| | neurotransmitter | | | |
| | transporter | | | |
| | NTT73 | | | |
| | (Orphan | | | |
| | transporter | | | |
| | v7-3) - Rattus | | | |
| | norvegicus | | | |
| | (Rat), 729 aa. | | | |
| I65413 | sodium-dependent | 150 . . . 427 | 99/281 (35%) | 2e−45 |
| | neurotransmitter | 368 . . . 644 | 160/281 (56%) | |
| | transporter - rat, | | | |
| | 728 aa | | | |
| | (fragment). | | | |
| Q9XS59 | Orphan sodium- | 152 . . . 427 | 95/279 (34%) | 2e−44 |
| | and chloride- | 371 . . . 645 | 158/279 (56%) | |
| | dependent | | | |
| | neurotransmitter | | | |
| | transporter | | | |
| | NTT73 (Orphan | | | |
| | transporter v7-3) - | | | |
| | Bos taurus | | | |
| | (Bovine), 729 aa. | | | |

[0353] PFam analysis predicts that the NOV6a protein contains the domains shown in the Table 6F.

TABLE 6F
Domain Analysis of NOV6a

| | | Identities/ | |
|---|---|---|---|
| | NOV6a | Similarities | Expect |
| Pfam Domain | Match Region | for the Matched Region | Value |
| SNF | 205 . . . 425 | 82/225 (36%) | 5.2e−40 |
| | | 160/225 (71%) | |

### Example 7

[0354] The NOV7 clone was analyzed, and the nucleotide and encoded polypeptide sequences are shown in Table 7A.

TABLE 7A
NOV7 Sequence Analysis

| | SEQ ID NO:19 | 4795 bp |
|---|---|---|
| NOV7a, | ACAGCCGCGCGACGCCGCCGCCTTAGAACGCCTTTCCAGTACTGCTAGCAGCAGCCCG | |
| CG120123-02 | ACCACGCGTTACCGCACGCTCGCGCCTTTCCCTTGACACGGCGGACGCCGGAGGATTG | |
| DNA | GGGCGGCAATTTGTCTTTTCCTTTTTTATTAAAATTATTTTTCCTcSCCTGTTGTTGGA | |
| Sequence | TTTGGGGAAATTTTTTGTTTGTTTTTTATGATTTGTATTTGACTGAGAGAAACCCACT | |
| | GAAGACGTCTGCGTGAGAATAGAGACCACCGAGGCCGACTCGCGGGCCGCTGCACCCA | |
| | CCGCCAAGGACAAAAGGAGCCCAGCGCTACTAGCTGCACCCGATTCCTCCCAGTGCTT | |
| | AGCATGAAGAAGGCCGAAATGGGACGATTCAGTATTTCCCCGGATGAAGACAGCAGCA | |
| | GCTACAGTTCCAACAGCGACTTCAACTACTCCTACCCCACCAAGCAAGCTGCTCTGAA | |
| | AAGCCATTATGCAGATGTAGATCCTGAAAACCAGAACTTTTTACTTGAATCGAATTTG | |
| | GGGAAGAAGAAGTATGAAACAGAATTTCATCCAGGTACTACTTCCTTTGGAATGTCAG | |
| | TATTTAATCTGAGCAATGCGATTGTGGGCAGTGGAATCCTTGGGCTTTCTTATGCCAT | |
| | GGCTAATACTGGAATTGCTCTTTTTATAATTCTCTTGACATTTGTGTCAATATTTTCC | |
| | CTGTATTCTGTTCATCTCCTTTTGAAGACTGCCAATGAAGGAGGGTCTTTATTATATG | |
| | AACAATTGGGATATAAGGCATTTGGATTAGTTGGAAAGCTTGCAGCATCTGGATCAAT | |
| | TACAATGCAGAACATTGGAGCTATGTCAAGCTACCTCTTCATAGTGAAATATGAGTTG | |
| | CCTTTGGTGATCCAGGCATTAACGAACATTGAAGATAAAACTGGATTGTGGTATCTGA | |
| | ACGGGAACTATTTGGTTCTGTTGGTGTCATTGGTGGTCATTCTTCCTTTGTCGCTGTT | |
| | TAGAAATTTAGGATATTTGGGATATACCAGTGGCCTTTCCTTGTTGTGTATGGTGTTC | |
| | TTTCTGATTGTGGTCATTTGCAAGAAATTTCAGGTTCCGTGTCCTGTGGAAGCTGCTT | |
| | TGATAATTAACGAAACAATAAACACCACCTTAACACAGCCAACAGCTCTTGTACCTGC | |
| | TTTGTCACATAACGTGACTGAAAATGACTCTTGCAGACCTCACTATTTTATTTTCAAC | |
| | TCACAGACTGTCTATGCTGTGCCAATTCTGATCTTTTCATTTGTCTGTCATCCTGCTG | |
| | TTCTTCCCATCTATGAAGAACTGAAAGACCGCAGCCGTAGAAGAATGATGAATGTGTC | |
| | CAAGATTTCATTTTTTGCTATGTTTCTCATGTATCTGCTTGCCGCCCTCTTTGGATAC | |
| | CTAACATTTTACGAACATGTTGAGTCAGAATTGCTTCATACCTACTCTTCTATCTTGG | |
| | GAACTGATATTCTTCTTCTCATTGTCCGTCTGGCTGTGTTAATGGCTGTGACCCTGAC | |
| | AGTACCAGTAGTTATTTTCCCAATCCGGAGTTCTGTAACTCACTTGTTGTGTGCATCA | |
| | AAAGATTTCAGTTGGTGGCGTCATAGTCTCATTACAGTGTCTATCTTGGCATTTACCA | |
| | ATTTACTTGTCATCTTTGTCCCAACTATTAGGGATATCTTTGGTTTTATTGGTGCATC | |
| | TGCAGCTTCTATGTTGATTTTTATTCTTCCTTCTGCCTTCTATATCAAGTTGGTGAAG | |
| | AAAGAACCTATGAAATCTGTACAAAAGATTGGGGCTTTGTTCTTCCTGTTAAGTGGTG | |
| | TACTGGTGATGACCGGAAGCATGGCCTTGATTGTTTTGGATTGGGTACACAATGCACC | |
| | TGGAGGTGGCCATTAATGGCACCACTCAAACTCAAACTCAGTCCATCTGATGCCAGT | |
| | GTTGAGTAAACTCAACTACTATGAAATTTCACCTAATGTTTTCAGTTTCACTTCCTTT | |
| | TGAAGTGCAGATTCCTCGCTGGTTCTTCTGAGTGCAGAATAAGTGAACTTTTTTGTTT | |
| | TGTTTTGTTTTTTTAAGAAACTTATCTGTATGTTAGAAATGGATATGAACAACAAAAC | |
| | CACGAGTCTCGGGTTAAGGGAAGTGACAATTTTATTCCCATTCCAGAGAATGGACAAA | |
| | CTCTTAACTTTTATCAAGCCACATGCTTGGCTGTGTCATTGTTTAACTTGGATATTTT | |
| | ATGATTTTACTTGAATGTGCCTAATGGAACCATTTGATGTGAGAAACAATTCTTTTTA | |
| | ATTTACAGCAAAATATTGAATAACCATTGACAAAAACACTATTATTTTTTGTACCAAA | |
| | AATACTTAAAGACCTCAGAAGCACTCTTTTACTTTTAAGAAATTGCTTTTTTGAACTT | |
| | TATTCAGAAGCAGTTATCAATAAATTCCATAAAATAATGTCATTGGTATTTAAAAATG | |
| | AATATTAATATAATGAAATGGTTTGCCTTTTTGTAGGCATAATAAGCCAAATACTTTT | |
| | TTACCCAAAATAATTTTTAGAGAAAATGATGTAATGAAAAATTGTACCATGAATTAGG | |
| | AGCATAGTTTTTTCCATTTAAACGTCACCATTACTTAAAAGATGATTGATTATTGCTA | |
| | TACCAAATCAGATGAACTCTGTTCATCACTTTTCTTCTCTGTCCCCAAACAATTTGGT | |
| | TCATTCAGACTGAAATGTTTGTGTCTTCAACTTATTAGAATGGAAGATAATGCAGATA | |
| | TTTCTGTGGGAAATAAAATAACTAATTTTGAGGTACCAAATAGTGCAATTGGGTAAAA | |
| | CAGGGTTTATTCAGTTGCATCTGTCTCCAGTGTTGTATTGACAGCTCTGGGTCTTTTT | |
| | TTGGGCCAGCCCTTTTTTGACATTGCTTCCAGCAGTGGAAAATGGGCATTTGATGGCA | |
| | ATAGGCCAAAATTATTGTGTCCAGAGAGTACACTTTTTCAAAATGCTCACCTACTGGA | |
| | AGTGTGAATTACTTGACAATGTATGGCTTAGTTGTGTTCATGTTTTGTCTACAGTAGA | |
| | GGTCTAATCCACAGGTTACACCTATGTTTGATATGATATAAGTTCTCTTTGCGTAGGC | |
| | CACTGGGTTTCTCATGCAGTAAGCTTTATAAAAACTCATTTGCACTGGACTGTCATCT | |
| | CATTCTTGTACAACGTAGAATTACTTGTTTACATCCAACAAATGGTTAGCTAGGGAAA | |
| | ACAGTGCAAACTGAGTGTTAGTAGTCATTTTGGTCCAACTGCATGTCAACCCTTCCAT | |
| | TATCGTACGTCACAGTGTATGGTGAATATATTATTAAATAATGTGGTACTTCGCTCAT | |
| | CAGGCATAATGTCTAAAATCTAATATACATAATTCCATTAAGTGGTTGAAGGAAGCAA | |
| | ATAATGGAATTGTCAATTGGTCATCTGGCTGTAAGGTTTGCCCTTGAACTAAAAATGT | |
| | TGTTTGGGGCAAGGGCCAGAAATGTGGAGACATGGTTTTTGTTACGCATTCTTGTATT | |
| | ATATGTGACTAAATTTACAAACAAGATACATGTGTAATTAAAGACCCTTATGGAACTG | |
| | GAAGACGTCTTGTAGTGCTACATTGCAGTGAAACCGTTGGTCCATTTTTGTCCTGTTTC | |
| | TATGAAGATAAAATAATTGGGGGCCATCTAGAAATAGAAAGGCAGTGGGAAGACAGAT | |
| | TCTACGGCACTGCTTTCATTTAATTGGGCTTTAGGCACTCCATTCGAATGCAGAACCT | |
| | CACCTCTAGTTGAGACCAAGAATTGGCAAATTTGCATGAGCTCCTGGAAAGAGTTGCT | |
| | GACTTTGTATCTAAGACCTGCCAGGGAATACCAAGAGTTGTTTCTACAGACTTTTTTT | |
| | TTTTTTTTGTATGGGAGAAGATACTGTGGCAACCAGGAAGGAATGGAAAAAAAATTCT | |
| | TTTCTCTACAGCAAATTAATGTGAGGAAGCTCCTCCAATCCTCTGGCTATTTAAGGTT | |
| | CAAAATCAAGTGCCTAGGGAAAATTCCAATGGATGATTTTCTGGGAGCTATCTTGTCT | |
| | ACCTTGAGGTTCCTGAACAATGAATTCCCATTAATGAGCAGTCTTCAGTATTAAAACC | |
| | ACTGTCTTGTCACCTCATTTTGCATTACTGTCTTCCGTGGATGTTTCAGTTACAACTG | |
| | TAATGTTATTTATAGAACAACATTAATCCATTAAAGCTAACCTATTTTTCAATATTTA | |
| | TGATAATCTATGTACATATATTGTCTGTCCATATGTATTTGTAAATAGGTTGTATATA | |
| | ATGTCAGGTTTGGGTCTTGGGTTCAAGTGTATATATTCCTGTAAGTTTCTTAACTGCA | |
| | TTTTGATGAATTCACATTATGTAACTATAAGAATTGTCCCAAAAGTACCTGTACAGAA | |
| | AATTGAATATTGAAAAATTGACAAATTGTGTACAAACACTAAAAAAAACTTGTTTAAA | |
| | TTGTATTTGCAATAAACAACATCAAATTTTTTCATGAAATCTTGGTACAAATTCAGAT | |
| | CTCTTATTTAAAATTTAAATAAGGAATACATTTTCAAAATGCAGTAATCAAAATGTGA | |
| | TCTAGTGTAATGAAATAAAATGTGATCTAGTGTAATGGAAGACCTTTGAGAACCTGGG | |
| | TGTATTAACTTTGTGTATATAGTGTAAATATCCCCACTGTACTGTTAGAGGCCAACAA | |
| | TTCTAGTATGGCTTGTTGGCAAAGAGTGCTACACCGTTTCAATGAAACAATGTATGTT | |
| | TGTTTTAACTGAACTAAAATAAATACATGCTTAATCCTG | |
| | ORF Start ATG at 352 | ORF Stop TAA at 1870 |
| | SEQ ID NO:20 | 506 aa MW at 56025.2 kD |

| | |
|---|---|
| NOV7a, | MKKAEMGRFSISRDEDSSSYSSNSDFNYSYPTKQAALKSHYADVDPENQNFLLESNLG |
| CG120123-02 | KKKYETEFHPGTTSFGMSVFNLSNAIVGSGILGLSYAMANTGIALFIILLTFVSIFSL |
| Protein | YSVHLLLKTANEGGSLLYEQLGYKAFGLVGKLAASGSITMQNIGAMSSYLFIVKYELP |
| Sequence | LVIQALTNIEDKTGLWYLNGNYLVLLVSLVVILPLSLFRNLGYLGYTSGLSLLCMVFF |
| | LIVVICKKFQVPCRVEAALIINETINTTLTQRTALVPALSHNVTENDSCRPHYFIFNS |
| | QTVYAVPILIFSFVCHPAVLRIYEELKDRSRRRMMNVSKISPFAMFLMYLLAALFGYL |
| | TFYEHVESELLHTYSSILGTDILLLIVRLAVLMAVTLTVPVVIFRIRSSVTHLLCASK |
| | DFSWWRHSLITVSILAFTNLLVIFVPTIRDIFGFIGASAASMLIFILPSAFYIKLVKK |
| | FPMKSVQKIGALFFLLSGVLVMTGSMALIVLDWVHNAPGGGH |

[0355] Further analysis of the NOV7a protein yielded the following properties shown in Table 7B.

TABLE 7B
Protein Sequence Properties NOV7a

| | |
|---|---|
| PSort | 0.6000 probability located in plasma membrane; 0.4000 |
| analysis: | probability located in Golgi body; 0.3000 probability located |
| | in endosplasmic reticulum (membrane); 0.0300 probability |
| | located in mitochondrial inner membrane |
| SignalP | No Known Signal Sequence Predicted |
| analysis: | |

[0356] A search of the NOV7a protein against the Geneseq database, a proprietary database that contains sequences published in patents and patent publication, yielded several homologous proteins shown in Table 7C.

TABLE 7C
Geneseq Results for NOV7a

| | | | Identities/ | |
|---|---|---|---|---|
| | | | Similari- | |
| | | NOV7a | ties | |
| | Protein/ | Residues/ | for the | |
| Geneseq | Organism/Length | Match | Matched | Expect |
| Identifier | [Patent #, Date] | Residues | Region | Value |
| AAE21174 | Human TRICH-18 | 1 . . . 506 | 506/506 | 0.0 |
| | protein - Homo | 1 . . . 506 | (100%) | |
| | sapiens, 506 aa. | | 506/506 | |
| | [WO200212340-A2, | | (100%) | |
| | 14 FEB. 2002] | | | |
| AAB93237 | Human protein | 105 . . . 506 | 400/402 | 0.0 |
| | sequence SEQ ID | 5 . . . 406 | (99%) | |
| | NO: 12239 - Homo | | 401/402 | |
| | sapiens, 406 aa. | | (99%) | |
| | [EP1074617-A2, | | | |
| | 07 FEB. 2001] | | | |
| AAG73492 | Human gene | 190 . . . 506 | 317/317 | e−180 |
| | 26-encoded secreted | 1 . . . 317 | (100%) | |
| | protein fragment, | | 317/317 | |
| | SEQ ID NO: 268 - | | (100%) | |
| | Homo sapiens, 317 aa. | | | |
| | [WO200134628-A1, | | | |
| | 17 MAY 2001] | | | |
| AAE03133 | Human gene 5 | 190 . . . 506 | 317/317 | e−180 |
| | encoded secreted | 1 . . . 317 | (100%) | |
| | protein fragment, | | 317/317 | |
| | SEQ ID NO: 170 - | | (100%) | |
| | Homo sapiens, 317 aa. | | | |
| | [WO200132676-A1, | | | |
| | 10 MAY 2001] | | | |
| AAE16782 | Human transporter | 39 . . . 506 | 288/471 | e−160 |
| | and ion channel-19 | 13 . . . 473 | (61%) | |
| | (TRICH-19) protein - | | 349/471 | |
| | Homo sapiens, 474 aa. | | (73%) | |
| | [WO2001992304-A2, | | | |
| | 06 DEC. 2001] | | | |

[0357] In a BLAST searched of public sequence databases, the NOV7a protein w,as fluid to have homology to the proteins shown in the BLASTP data in Fable 7D.

TABLE 7D
Public BLASTP Results for NOV7a

| | | | Identities/ | |
|---|---|---|---|---|
| | | NOV7a | Similarities | |
| Protein | | Residues/ | for the | |
| Accession | Protein/ | Match | Matched | Expect |
| Number | Organism/Length | Residues | Portion | Value |
| Q9HAV3 | Amino acid | 1 . . . 506 | 506/506 (100%) | 0.0 |
| | transporter system | 1 . . . 506 | 506/506 (100%) | |
| | A (Amino acid | | | |
| | transporter system | | | |
| | A2) (KIAA1382 | | | |
| | protein) - | | | |
| | Homo sapiens | | | |
| | (Human), 506 aa. | | | |
| Q96QD8 | Putative 40-9-1 | 1 . . .506 | 505/506 (99%) | 0.0 |
| | protein - Homo | 1 . . . 506 | 506/506 (99%) | |
| | sapiens (Human), | | | |
| | 506 aa. | | | |
| Q9JHE5 | Amino acid | 1 . . . 506 | 448/506 (88%) | 0.0 |
| | system A | 1 . . . 504 | 475/506 (93%) | |
| | transporter | | | |
| | (System A | | | |
| | transporter | | | |
| | isoform 2) - | | | |
| | Rattus norvegicus | | | |
| | (Rat), 504 aa. | | | |
| Q9J188 | Amino acid | 1 . . . 506 | 445/506 (87%) | 0.0 |
| | transporter | 1 . . . 504 | 474/506 (92%) | |
| | system A - | | | |
| | Rattus norvegicus | | | |
| | (Rat), 504 aa. | | | |
| Q9NVA8 | CDNA FLJ10838 | 105 . . . 506 | 400/402 (99%) | 0.0 |
| | fis, clone | 5 . . . 406 | 401/402 (99%) | |
| | NT2RP4001274, | | | |
| | weakly similar | | | |
| | to human | | | |
| | transporter | | | |
| | protein (G17) | | | |
| | mRNA - Homo | | | |
| | sapiens (Human), | | | |
| | 406 aa. | | | |

[0358] PFam analysis predicts that the NOV7a protein contains the domains shown in the Table 7E.

TABLE 7E
Domain Analysis of NOV7a

| | NOV7a | Identities/Similarities | Expect |
|---|---|---|---|
| Pfam Domain | Match Region | for the Matched Region | Value |
| Aa_ trans | 95 . . . 489 | 98/476 (21%) | 4.6e−54 |
| | | 298/476 (63%) | |

### Example 8

[0359] The NOV8 clone was analyzed, and the nucleotide and encoded polypeptide sequences are shown in Table 8A.

TABLE 8A
NOV8 Sequence Analysis

| | SEQ ID NO:21 | 490 bp |
|---|---|---|
| NOV8a, | CGCCACCATGCCGCCCTACACCGTGGTCTATTTCCCAGTTCGAGGCCGCTGCGCGGCC | |
| CG120814-01 | CTGCGCATGCTGCTGGCAGATCAGGGCCAGAGATGGAAGGAGGAGGTGGTGACCGTGC | |
| DNA | AGACGTGGCAGGAGGGCTCACTCAAAGCCTCCTGCCTATACGGGCAGCTCCCCAAGTT | |
| Sequence | CAAGGCAAGACCTTCATTGTGGGAGACCAGATCTCCTTCGCTGACTACAACCTGCTGG | |
| | ACTTGCTGCTGATCCATGAGGTCCTAGCCCCTGGCTGCCTGGATGCGTTCCCCCTGCT | |
| | CTCAGCATATGTGGGGCGCCTCAGTGCCCGGCCCAAGCTCAAGGCCTTCCTGGCCTCC | |
| | CCTGAGTACGTGAACCTCCCCATCAATGGCAACGGGAAACAGTGAGGGTTGGGGGGAC | |
| | TCTGAGCGGGAGGCAGAGTTTGCCTTCCTTTCTCCAGGACCAATAAAATTTCTAAGAG | |
| | ORF Start: ATG at 8 | ORF Stop: TGA at 242 |
| | SEQ ID NO:22 | 78 aa MW at 8958.4 kD |

| | |
|---|---|
| NOV8a, | MPPYTVVYFPVRGRCAALRMLLADQGQRWKEEVVTVETWQEGSLKASCLYCQLPKFKA |
| CG120814-01 | RPSLWETRSPSLTTTCWTCC |
| Protein | |
| Sequence | |

[0360] Further analysis of the NOV8a protein yielded the following properties shown in Table 8B.

TABLE 8B
Protein Sequence Properties NOV8a

| | |
|---|---|
| PSort | 0.7838 probability located in mitochondrial intermembrane |
| analysis: | space; 0.5486 probability located in microbody (peroxisome); |
| | 0.4465 probability located in mitochondrial matrix space; |
| | 0.1352 probability located in mitochondrial inner membrane |
| SignalP | Cleavage site between residues 17 and 18 |
| analysis: | |

[0361] A search of the NOV8a protein against the Geneseq database, a proprietary database that contains sequences published in patents and patent publication, yielded several homologous proteins shown in Table 8C.

TABLE 8C
Geneseq Results for NOV8a

| | | | Identities/ | |
|---|---|---|---|---|
| | | NOV8a | Similarities | |
| | Protein/ | Residues/ | for the | |
| Geneseq | Organism/Length | Match | Matched | Expect |
| Identifier | [Patent #, Date] | Residues | Region | Value |
| AAG02025 | Human secreted | 1 . . . 57 | 55/57 (96%) | 2e−27 |
| | protein, SEQ | 1 . . . 57 | 56/57 (97%) | |
| | ID NO: 6106 - | | | |
| | Homo sapiens, 126 aa. | | | |
| | [EP1033401-A2, | | | |
| | 06 SEP. 2000] | | | |
| AAW49014 | Human glutathione | 1 . . . 57 | 55/57 (96%) | 2e−27 |
| | S-transferase | 1 . . . 57 | 56/57 (97%) | |
| | GSTP1c variant - | | | |
| | Homo sapiens, 210 aa. | | | |
| | [WO9821359-A1, | | | |
| | 22 MAY 1998] | | | |
| AAW49013 | Human glutathione | 1 . . . 57 | 55/57 (96%) | 2e−27 |
| | S-transferase | 1 . . . 57 | 56/57 (97%) | |
| | GSTP1b variant - | | | |
| | Homo sapiens, 210 aa. | | | |
| | [WO9821359-A1, | | | |
| | 22 MAY 1998] | | | |
| AAW49012 | Human glutathione | 1 . . . 57 | 55/57 (96%) | 2e−27 |
| | S-transferase | 1 . . . 57 | 56/57 (97%) | |
| | GSTP1a - | | | |
| | Homo sapiens, 210 aa | | | |
| | [WO9821359-A1, | | | |
| | 22 MAY 1998] | | | |
| AAR05448 | Human GSH | 1 . . . 57 | 53/57 (92%) | 2e−24 |
| | transferase - Homo | 1 . . . 56 | 54/57 (93%) | |
| | sapiens, 208 aa. | | | |
| | [WO9001548-A, | | | |
| | 22 FEB. 1990] | | | |

[0362] In a BLAST search of public sequence databases, the NOV8a protein was found to have homology to the proteins shown in the BLASTP data in Table 8D.

TABLE 8D
Public BLASTP Results for NOV8a

| | | | Identities/ | |
|---|---|---|---|---|
| | | NOV8a | Similarities | |
| Protein | | Residues/ | for | |
| Accession | Protein/ | Match | the Matched | Expect |
| Number | Organism/Length | Residues | Portion | Value |
| A37378 | glutathione transferase | 1 . . . 57 | 55/57 (96%) | 4e−27 |
| | (EC 2.5.1.18) pi | 1 . . . 57 | 56/57 (97%) | |
| | [validated] - | | | |
| | human, 210 aa. | | | |
| E967676 | SYNTHETIC AMINO | 1 . . . 57 | 55/57 (96%) | 4e−27 |
| | ACID SEQUENCE | 1 . . . 57 | 56/57 (97%) | |
| | FROM THE HUMAN | | | |
| | GSH TRANSFERASE | | | |
| | PI GENE vectors, | | | |
| | 210 aa. | | | |
| CAA00533 | HUMAN GSH | 1 . . . 57 | 55/57 (96%) | 4e−27 |
| | TRANSFERASE P1 | 1 . . . 57 | 56/57 (97%) | |
| | GENE PROTEIN - | | | |
| | synthetic construct, | | | |
| | 210 aa. | | | |
| Q15690 | Glutathione | 1 . . . 57 | 55/57 (96%) | 4e−27 |
| | S-transferase-PIC - | 1 . . . 57 | 56/57 (97%) | |
| | Homo sapiens | | | |
| | (Human), 210 aa. | | | |
| O00460 | Glutathione | 1 . . . 57 | 55/57 (96%) | 4e−27 |
| | S-transferase | 1 . . . 57 | 56/57 (97%) | |
| | (Glutathione | | | |
| | S-transferase pi) - | | | |
| | Homo sapiens | | | |
| | (Human), 210 aa. | | | |

[0363] PFam analysis predicts that the NOV8a protein contains the domains shown in the Table 8E.

TABLE 8E
Domain Analysis of NOV8a

| | NOV8a | Identities/Similarities | Expect |
|---|---|---|---|
| Pfam Domain | Match Region | for the Matched Region | Value |
| GST_N | 3 . . . 67 | 16/80 (20%) | 2.6e−06 |
| | | 46/80 (38%) | |

### Example 9

[0364] The NOV9 clone was analyzed, and the nucleotide and encoded polypeptide sequences are shown in Table 9A.

TABLE 9A
NOV9 Sequence Analysis

| | SEQ ID NO:23 | 625 bp |
|---|---|---|
| NOV9a, | TCATGGCCTCCGGTAACATGCACATTGGAAAGCTCACCCCTGACTTCAAGGCCACTGC | |
| CG122768-01 | CGTGGTGGATGGCACCTACAGGGAGGTAAAGCTGTTGGACTACAGAGGGAAGCACGTG | |
| DNA | GTCCTCTTTTTCCATCCTCTGGACTTCACTTTTTTTTTTCCCACAGAGATCATCGCAT | |
| Sequence | TCAGCGACCATGCTGAGGGCTTCCGAAGCTGCAAAGTTGCAAAGTGCTGGGGACCTC | |
| | GGTGGGCTCACAGTTCACCCACCTGGCTTGGATCAACATCCCCCGGAAGGAGGGAGGC | |
| | TTTGAGTCCCTGGACACCCCTCTGCTTGCTGACGTGACCCTGAAGTTGTCTGAGAATT | |
| | ACGGCGTGTTGAAAACAGACGAGGGCATTGTCTGCAGGGGCCTCTTTATCATCCATGG | |
| | CAAGGATGTCCTTCCCCAGATCGCTGTTAATGATTGGCCTGTGGGACACTTTGTGGAT | |
| | GAGGCCCTGCGGCTGGTCCAGGCCTTCCAGTACACAGACGAGCACCCGGAAATTTGTC | |
| | CTGCTGGCTGGAAGCCTGGCAGTGACATGATCAAGCCCAGCGTGAATGACAGCAAGGA | |
| | ATATTTCTCCAAACACAACTAGGCTGGCTGATGGATCATGAGCTT | |
| | ORF Start: ATG at 3 | ORF Stop: TAG at 600 |
| | SEQ ID NO:24 | 199 aa MW at 22326.3 kD |

| | |
|---|---|
| NOV9a, | MASGNMHIGKLTPDFKATAVVDGTYREVKLLDYRGKHVVLFFHRLDFTFFFPTEIIAF |
| CG122768-01 | SDHAEGFRKLQSCKVLGTSVGSQFTHLAWTNIPRKEGGFESLDTPLLADVTLKLSENY |
| Protein | IGVLKTDEGIVCRGLFIIHGKDVLPQIAVNDWPVGHFVDEALRLVQAFQYTDEHREICP |
| Sequence | AGWKPGSDMIKPSVNDSKEYFSKHN |

[0365] Further analysis of the NOV9a protein yielded the following properties shown in Table 9B.

TABLE 9B
Protein Sequence Properties NOV9a

| | |
|---|---|
| PSort | 0.6400 probability located in microbody (peroxisome); 0.4500 |
| analysis: | probability located in cytoplasm; 0.1569 probability located |
| | in lysosome (lumen); 0.1000 probability located in |
| | mitochondrial matrix space |
| SignalP | No Known Signal Sequence Predicted |
| analysis: | |

[0366] A search of the NOV9a protein against the Geneseq database, a proprietary database that contains sequences published in patents and patent publication, yielded several homologous proteins shown in Table 9C.

TABLE 9C
Geneseq Results for NOV9a

| | | | Identities/ | |
|---|---|---|---|---|
| | | NOV8a | Similarities | |
| | Protein/ | Residues/ | for the | |
| Geneseq | Organism/Length | Match | Matched | Expect |
| Identifier | [Patent #, Date] | Residues | Region | Value |
| AAU78580 | Mouse | 1 . . . 199 | 155/199 (77%) | 1e−85 |
| | peroxiredoxin | 1 . . . 198 | 166/199 (82%) | |
| | II-1 (Prxll-1) | | | |
| | protein - | | | |
| | Mus sp, 198 aa. | | | |
| | [KR99066020-A, | | | |
| | 16 AUG. 1999] | | | |
| AAB68036 | Amino acid | 1 . . . 199 | 155/199 (77%) | 9e−85 |
| | sequence of the | 1 . . . 198 | 168/199 (83%) | |
| | acid form of | | | |
| | peroxyredoxin | | | |
| | TDX1 - Homo | | | |
| | sapiens, 198 aa. | | | |
| | [FR2798672-A1, | | | |
| | 23 MAR. 2001] | | | |
| ABG26215 | Novel human | 22 . . . 199 | 136/178 (76%) | 4e−74 |
| | diagnostic protein | 43 . . . 219 | 150/178 (83%) | |
| | #26206 - Homo | | | |
| | sapiens, 219 aa. | | | |
| | [W0200175067- | | | |
| | A2, | | | |
| | 11 OCT. 2001] | | | |
| ABG26215 | Novel human | 22 . . . 199 | 136/178 (76%) | 4e−74 |
| | diagnostic protein | 43 . . . 219 | 150/178 (83%) | |
| | #26206 - Homo | | | |
| | sapiens, 219 aa. | | | |
| | [WO200175067- | | | |
| | A2, | | | |
| | 11 OCT. 2001] | | | |
| AAW09794 | Natural killer | 1 . . . 199 | 138/199 (69%) | 2e−70 |
| | cell enhancing | 1 . . . 178 | 151/199 (75%) | |
| | factor B - | | | |
| | Homo sapiens, | | | |
| | 178 aa. | | | |
| | [U.S. Pat. No. | | | |
| | 5610286-A, | | | |
| | 11 MAR. 1997] | | | |

[0367] In a BLASTP search of public sequence databases, the NOV9a protein was found to have homology to the proteins shown in the BLASTP data in Table 9D.

TABLE 9D
Public BLASTP Results for NOV9a

| | | | Identities/ | |
|---|---|---|---|---|
| | | NOV9a | Similarities | |
| Protein | | Residues/ | for | |
| Accession | Protein/ | Match | the Matched | Expect |
| Number | Organism/Length | Residues | Portion | Value |
| P35704 | Peroxiredoxin 2 | 1 . . . 199 | 154/199 (77%) | 1e−84 |
| | (Thioredoxin | 1 . . . 198 | 165/199 (82%) | |
| | peroxidase 1) | | | |
| | (Thioredoxin- | | | |
| | dependent peroxide | | | |
| | reductase 1) | | | |
| | (Thiol-specific | | | |
| | antioxidant protein) | | | |
| | (TSA) - | | | |
| | Rattus norvegicus | | | |
| | (Rat), 198 aa. | | | |
| P32119 | Peroxiredoxin 2 | 1 . . . 199 | 155/199 (77%) | 2e−84 |
| | (Thioredoxin | 1 . . . 198 | 168/199 (83%) | |
| | peroxidase 1) | | | |
| | (Thioredoxin- | | | |
| | dependent peroxide | | | |
| | reductase | | | |
| | (TSA) (PRP) | | | |
| | (Natural killer | | | |
| | cell enhancing | | | |
| | factor B) | | | |
| | (NKEF-B) - | | | |
| | Homo sapiens | | | |
| | (Human), 198 aa. | | | |
| Q61171 | Peroxiredoxin 2 | 1 . . . 199 | 154/199 (77%) | 3e−84 |
| | (Thioredoxin | 1 . . . 198 | 165/199 (82%) | |
| | peroxidase 1) | | | |
| | (Thioredoxin- | | | |
| | dependent peroxide | | | |
| | reductase 1) | | | |
| | (Thiol-specific | | | |
| | antioxidant protein) | | | |
| | (TSA) - Mus | | | |
| | musculus (Mouse), | | | |
| | 198 aa. | | | |
| O88376 | Type II | 1 . . . 199 | 154/199 (77%) | 4e−84 |
| | peroxiredoxin 1 - | 1 . . . 198 | 165/199 (82%) | |
| | Mus musculus | | | |
| | (Mouse), 198 aa. | | | |
| Q9CWJ4 | Peroxiredoxin 2 - | 1 . . . 199 | 153/199 (76%) | 6e−84 |
| | Mus musculus | 1 . . . 198 | 165/199 (82%) | |
| | (Mouse), 198 aa. | | | |

[0368] PFam analysis predicts that the NOV9a protein contains the domains shown in the Table 9E.

TABLE 9E
Domain Analysis of NOV9a

| | NOV9a | Identities/Similarities | Expect |
|---|---|---|---|
| Pfam Domain | Match Region | for the Matched Region | Value |
| AhpC-TSA | 8 . . . 158 | 78/162 (48%) | 2.1e−49 |
| | | 121/162 (75%) | |

### Example 10

[0369] The NOV10 clone as analyzed, and the nucleotide and encoded polypeptide sequences are shown in Table 10A.

TABLE 10A
NOV10 Sequence Analysis

| | SEQ ID NO:25 | 1081 bp |
|---|---|---|
| NOV10a. | CTGGGGATGATGACGGATCTGAAGCAAAGCCATTCAGTGAGGCTGAATGATGGACCCT | |
| CG122786-01 | TCATGCCAGTGCTGGGATTTGGCACTTATGCTCCTGATCATGTAAGTGGACCCCAGGA | |
| DNA | GGCTGAAGTTTCTCCCAAAAGCCAGGCTGCCGAGGCCACCAAAGTGGCTATTGACGTA | |
| Sequence | GGCTTCCGCCATATTGATTCAGCATACTTATACCAAAATGAGGAGGAGGTTGGACAGG | |
| | CCATTTGGGAGAAGATCGCTGATGGTACCGTCAAGAGAGAGGAAATATTCTACACCAT | |
| | CAAGCTTTGGGCTACTTTCTTTCGGGCAGAATTGGTTCACCCGGCCCTAGAAAGGTCA | |
| | CTGAAGAAACTTGGACCGGACTATGTAGATCTCTTCATTATTCATGTACCATTTGCTA | |
| | TGAAGTTCTTTATCTTCTTTTCTATTTTCCAGCCTGGGAAAGAATTACTGCCAAAGGA | |
| | TGCCAGTGGAGAGATTATTTTAGAAACTGTGGAGCTTTGTGACACTTGGGAGGTACAG | |
| | GCCCTGGAGAAGTGCAAAGAAGCAGGTTTAACCAGGTCCATTGGGGTGTCCAATTTCA | |
| | ATCACAAGCTGCTGGAACTCATCCTCAACAAGCCAGGGCTCAAGTACAAGCCCACCTG | |
| | CAACCAGGTGCAGGTGGAATGTCACCCTTACCTCAACCAGAGCAAACTCCTGGAGTTC | |
| | TGCAAGTCCAAGGACATTGTTCTAGTTGCCTACAGTGCCCTGGGATCCCAAAGAGACC | |
| | CACAGTGGGTGGATCCCGACTGCCCACATCTCTTGGAGGAGCCGATCTTGAAATCCAT | |
| | TGCCAAGAAACACAGTGGAAGCCCAGGCCAGGTCGCCCTGCGCTACCAGCTGCAGCGG | |
| | GGAGTGGTGGTGCTGGCCAAGAGCTTCTCTCAGGAGAGAATCAAAGAGAACTTCCAGG | |
| | TATCCTTTCAGATTTTTGACTTTGAGTTGACTCCAGAGGACATGAAAGCCATTGATGG | |
| | CCTCAACAGAAATCTCCGATATGACAAGTTACAATTGGCTAATCACCCTTATTTTCCA | |
| | TTTTCTGAAGAATATTGACCATGAGCTATTGAACATT | |
| | ORF Start: ATG at 7 | ORF Stop: TGA at 1060 |
| | SEQ ID NO:26 | 351 aa MW at 40003.5 kD |

| | |
|---|---|
| NOV10a, | MMTDLKQSHSVRLNDGPFMPVLGFGTYAPDHVSGPQEAEVSPKSQAAEATKVAIDVGF |
| CG122786-01 | AARHIDSAYLYQNEEEVGQAIWEKIADGTVKREEIFYTTKLWATFFRAELVHPALERSLK |
| Protein | KLGPDYVDLFIIHVPFANKFFIFFSIFQPGKELLPKDASGEIILETVELCDTWEVQAL |
| Sequence | EKCKEAGLTRSIGVSNFNHKLLELILNKPGLKYKPTCNQVQVECHPYLNQSKLLEFCK |
| | SKDIVLVAYSALGSQRDPQWAAVDPDCPHLLEEPILKSIAKKHSGSPGQVALRYQLQRGV |
| | VVLAKSFSQERIKENFQVSFQIFDFELTPEDMKAIDGLNPAANLRYDKLQLANHPYPRFS |
| | EEY |

[0370] Further analysis of the NOV10a protein yielded the following, properties shown in Table 10B.

TABLE 10B
Protein Sequence Properties NOV10a

| | |
|---|---|
| PSort | 0.7000 probability located in plasma membrane; 0.5312 |
| analysis: | probability located in microbody (peroxisome); 0.2000 |
| | probability located in endoplasmic reticulum (membrane); |
| | 0.1000 probability located in mitochondrial inner membrane |
| SignalP | No Known Signal Sequence Predicted |
| analysis: | |

[0371] A search of the NOV10a protein against the Geneseq database, a proprietary database that contains sequences published in patents and patent publication, yielded several homologous proteins shown in Table 10C.

TABLE 10C
Geneseq Results for NOV10a

| | | | Identities/ | |
|---|---|---|---|---|
| | | NOV10a | Similarities | |
| | Protein/ | Residues/ | for the | |
| Geneseq | Organism/Length | Match | Matched | Expect |
| Identifier | [Patent #, Date] | Residues | Region | Value |
| ABB07529 | Human drug | 11 . . . 351 | 287/342 (83%) | e−157 |
| | metabolizing | 8 . . . 323 | 297/342 (85%) | |
| | enzyme (DME) | | | |
| | (ID: | | | |
| | 7478994CDI) - | | | |
| | Homo sapiens, | | | |
| | 323 aa. | | | |
| | [WO200204612- | | | |
| | A2, | | | |
| | 17 JAN. 2002] | | | |
| AAM79455 | Human protein | 4 . . . 351 | 222/349 (63%) | e−121 |
| | SEQ ID NO | 4 . . . 325 | 271/349 (77%) | |
| | 3101 - | | | |
| | Homo sapiens, | | | |
| | 325 aa. | | | |
| | [WO200157190- | | | |
| | A2, | | | |
| | 09 AUG. 2001] | | | |
| AAM78471 | Human protein | 4 . . . 351 | 222/349 (63%) | e−121 |
| | SEQ ID NO | 2 . . . 323 | 271/349 (77%) | |
| | 1133 - | | | |
| | Homo sapiens, | | | |
| | 323 aa. | | | |
| | [WO200157190- | | | |
| | A2, | | | |
| | 09 AUG. 2001] | | | |
| AAW14799 | Type 5 17-beta- | 4 . . . 351 | 222/349 (63%) | e−121 |
| | hydroxysteroid | 2 . . . 323 | 271/349 (77%) | |
| | dehydrogenase - | | | |
| | Homo sapiens, | | | |
| | 323 aa. | | | |
| | [WO9711162- | | | |
| | A1, | | | |
| | 27 MAR. 1997] | | | |
| AAB43444 | Human cancer | 1 . . . 351 | 218/353 (61%) | e−118 |
| | associated protein | 10 . . . 336 | 270/353 (75%) | |
| | sequence SEQ ID | | | |
| | NO: 889 - Homo | | | |
| | 21 SEP. 2000] | | | |

[0372] In a BLAST search of public sequence databases, the NOV10a protein was found to have homology to the proteins shown in the BLASTP data in Table 10D.

TABLE 10D
Public BLASTP Results for NOV10a

| | | | Identities/ | |
|---|---|---|---|---|
| | | NOV10a | Similarities | |
| Protein | | Residues/ | for | |
| Accession | Protein/ | Match | the Matched | Expect |
| Number | Organism/Length | Residues | Portion | Value |
| P05980 | Prostaglandin-F | 7 . . . 351 | 231/346 (66%) | e−124 |
| | synthase 1 | 4 . . . 323 | 271/346 (77%) | |
| | (EC 1.1.1.188) | | | |
| | (PGF synthase 1) | | | |
| | (PGF 1) | | | |
| | (Prostaglandin-D2 | | | |
| | 11 reductase 1) | | | |
| | (PGFS1) - | | | |
| | Bos taurus | | | |
| | (Bovine), 323 aa. | | | |
| P52897 | Prostaglandin-F | 7 . . . 351 | 231/346 (66%) | e−124 |
| | synthase 2 | 4 . . . 323 | 270/346 (77%) | |
| | (EC 1.1.1.188) | | | |
| | (PGF synthase 2) | | | |
| | (PGF 2) | | | |
| | (Prostaglandin-D2 | | | |
| | 11 reductase 2) | | | |
| | (PGFSII) - | | | |
| | Bos taurus | | | |
| | (Bovine). 323 aa. | | | |
| P52898 | Dihydrodiol | 11 . . . 351 | 229/342 (66%) | e−123 |
| | dehydrogenase 3 | 8 . . . 323 | 266/342 (76%) | |
| | (EC 1.-.-.-) | | | |
| | (Prostaglandin F | | | |
| | synthase) - | | | |
| | Bos taurus | | | |
| | (Bovine), 323 aa. | | | |
| P42330 | Aldo-keto | 4 . . . 351 | 222/349 (63%) | e−121 |
| | reductase family 1 | 2 . . . 323 | 271/349 (77%) | |
| | member C3 | | | |
| | (EC 1.1.1.-) | | | |
| | (Trans-1,2- | | | |
| | dihydrobenzene- | | | |
| | 1,2-diol | | | |
| | dehydrogenase) | | | |
| | (EC 1.3.1.20) | | | |
| | (Chlordecone | | | |
| | reductase homolog | | | |
| | HAKRb) | | | |
| | (HA1753) | | | |
| | (Dihydrodiol | | | |
| | dehydrogenase, | | | |
| | type 1) | | | |
| | (Dihydrodiol | | | |
| | dehydrogenase 3) | | | |
| | (DD3) (3- | | | |
| | alpha- | | | |
| | hydroxysteroid | | | |
| | dehydrogenase) | | | |
| | (3alpha-HSD) | | | |
| | (Prostaglandin F | | | |
| | synthase) | | | |
| | (EC 1.1.1.188) - | | | |
| | Homo sapiens | | | |
| | (Human), 323 aa. | | | |
| B57407 | 3alpha- | 4 . . . 351 | 222/349 (63%) | e−120 |
| | hydroxysteroid | 2 . . . 323 | 270/349 (76%) | |
| | dehydrogenase | | | |
| | (EC 1.1.1.-) II - | | | |
| | human, 323 aa. | | | |

[0373] PFam analysis predicts that the NOV10a protein contains the domains shown in the Table 10E.

TABLE 10E
Domain Analysis of NOV10a

| | NOV10a | Identities/Similarities | Expect |
|---|---|---|---|
| Pfam Domain | Match Region | for the Matched Region | Value |
| aldo_ket_red | 13 . . . 332 | 162/383 (42%) | 7.1e−124 |
| | | 269/383 (70%) | |

### Example 11

[0374] The NOV11 clone was analyzed, and the nucleotide and encoded polypeptide sequences are shown in Table 11A.

TABLE 11A
NOV11 Sequence Analysis

| | SEQ ID NO:27 | 698 bp |
|---|---|---|
| NOV11a, | AAAAAAATCTGCATGAGCATGTATCCACCCATTAATGGCCTTGACTGGGCCAATATTTh | |
| CG122795-01 | TTGTCGTCGGCGGATCTGCATGGGGTGGGTGTTCCACGCTGTTAATGAATGAACTCGA | |
| DNA | AAGGGTTTCGTTCGACCTGGCGTGTAATTTGCTGATTTGGGTGGGAGACCTTGTTGCC | |
| Sequence | CGCGGCGCGAAAAACGTCGAGTGCCTGAACTTGATTACTATGCCTTGGTTCCGGGCTG | |
| | TGCGAGGTAACCATGAGCAGATGATGATTGATGGGCTATCGGAGTATGGAAACGTTAA | |
| | CCACTGGCTGGAAAACGGCGGCGTGTGGTTCTTCAGTCTTGATTATGAAAAAGAGGTG | |
| | CTGGCTAAGGCTCTGGTTCATAAATCGGCCAGCCTGCCATTCGTCATCGAGCTGGTTA | |
| | CCGCTGAACGTAAAATCGTTATCTGCCACGCTGACTACCCGCATAACGAATATGCGTT | |
| | CGACAAGCCGGTCCCGAAAGACATGGTCATCTGGAATCGTGAACGGGTTAGCGACGCT | |
| | CAGGACGGCATTGTCTCGCCGATAGCTGGTGCTGATCTGTTTATCTTCGGCCACACCC | |
| | CTGCGCGCCAGCCCCTGAAGTATGCCAACCAGATGTACATCGATACTGGTGCCGTGTT | |
| | CTGCGGAAACCTCACGCTGGTACAGGTTCAAGGTGGTGCCCATGCGTAAACCATCCCG | |
| | CC | |
| | ORF Start: ATG at 13 | ORF Stop: TAA at 685 |
| | SEQ ID NO:28 | 224 aa MW at 24915.4 kD |

| | |
|---|---|
| NOV11a. | MSMYPPINGLDWANIFVVGGSAWGGCSTLLMNELERVSFDLACNLLIWVGDLVARGAK |
| CG122795-01 | NVECLNLITMPWFRAVRGNHEQMMIDGLSFYGNVNHWLENGGVWFFSLDYEKEVLAKA |
| Protein | LVHKSASLPFVIELVTAERKIVICHADYPHNEYAFDKRVPKDMVIWNRERVSDAQDGI |
| Sequence | VSPIAGADLFIFGHTPARQPLKYANQMYIDTGAVFCGNLTLVQVQGGAHA |

[0375] Further analysis of the NOV11a protein yielded the following properties shown in Table 11B.

TABLE 11B
Protein Sequence Properties NOV11a

| | |
|---|---|
| PSort | 0.5500 probability located in endoplasmic reticulum |
| analysis | (membrane); 0.3479 probability located in lysosome (lumen); |
| | 0.2518 probability located in microbody (peroxisome); 0.1000 |
| | probability located in endoplasmic reticulum (lumen) |
| SignalP | No Known Signal Sequence Predicted |
| analysis: | |

[0376] A search of the NOV11a protein against the Geneseq database, a proprietary database that contains sequences published in patents and patent publication, yielded several homologous proteins shown in Table 11C.

TABLE 11C
Geneseq Results for NOV11a

| | | | Identities/ | |
|---|---|---|---|---|
| | | NOV11a | Similarities | |
| | Protein/ | Residues/ | for the | |
| Geneseq | Organism/Length | Match | Matched | Expect |
| Identifier | [Patent #, Date] | Residues | Region | Value |
| ABG01589 | Novel human | 36 . . . 220 | 175/185 (94%) | e−101 |
| | diagnostic | 58 . . . 242 | 179/185 (96%) | |
| | protein #1580 - | | | |
| | Homo sapiens, | | | |
| | 634 aa. | | | |
| | [WO200175067- | | | |
| | A2, | | | |
| | 11 OCT. 2001] | | | |
| ABG01589 | Novel human | 36 . . . 220 | 175/185 (94%) | e−101 |
| | diagnostic | 58 . . . 242 | 179/185 (96%) | |
| | protein #1580 - | | | |
| | Homo sapiens, | | | |
| | 634, aa. | | | |
| | [WO200175067- | | | |
| | A2, | | | |
| | 11 OCT. 2001] | | | |
| ABG01590 | Novel human | 1 . . . 180 | 163/180 (90%) | 7e−91 |
| | diagnostic | 12 . . . 189 | 166/180 (91%) | |
| | protein #1581 - | | | |
| | Homo sapiens, | | | |
| | 515 aa. | | | |
| | [WO200175067- | | | |
| | A2, | | | |
| | 11 OCT. 2001] | | | |
| ABG01590 | Novel human | 1 . . . 180 | 163/180 (90%) | 7e−91 |
| | diagnostic | 12 . . . 189 | 166/180 (91%) | |
| | protein #1581 - | | | |
| | Homo sapiens, | | | |
| | 515 aa. | | | |
| | [WO200175067- | | | |
| | A2, | | | |
| | 11 OCT. 2001] | | | |
| ABG18236 | Novel human | 9 . . . 130 | 107/122 (87%) | 6e−56 |
| | diagnostic protein | 49 . . . 168 | 110/122 (89%) | |
| | #18227 - | | | |
| | Homo sapiens, | | | |
| | 193 aa. | | | |
| | [WO200175067- | | | |
| | A2, | | | |
| | 11 OCT. 2001] | | | |

[0377] In a BLAST search of public sequence databases, the NOV11a protein was found to have homology to the proteins shown in the BLASTP data in Table 11D.

TABLE 11D
Public BLASTP Results for NOV11a

| | | NOV11a | Identities/ | |
|---|---|---|---|---|
| Protein | | Residues/ | Similarities for | |
| Accession | Protein/ | Match | the Matched | Expect |
| Number | Organism/Length | Residues | Portion | Value |
| P03772 | Serine/threonine | 1 . . . 220 | 152/220 (69%) | 5e−85 |
| | protein phosphatase | 1 . . . 218 | 176/220 (79%) | |
| | (EC 3.1.3.16)— | | | |
| | Bacteriophage | | | |
| | lambda, 221 aa. | | | |
| Q8X993 | Hypothetical 25.1 | 1 . . . 220 | 151/220 (68%) | 3e−84 |
| | kDa protein | 1 . . . 218 | 175/220 (78%) | |
| | (Putative serine/ | | | |
| | threonine protein | | | |
| | phosphatase)— | | | |
| | Escherichia coli | | | |
| | O157:H7, 221 aa. | | | |
| Q8X3X2 | Hypothetical protein | 81 . . . 220 | 103/140 (73%) | 1e−57 |
| | z0954—Escherichia | 1 . . . 140 | 118/140 (83%) | |
| | coli O157:H7, | | | |
| | 143 aa. | | | |
| Q8XCL4 | Protein phosphatase | 3 . . . 219 | 95/217 (43%) | 2e−41 |
| | 1 modulates | 8 . . . 219 | 127/217 (57%) | |
| | phosphoproteins, | | | |
| | signals protein | | | |
| | misfolding | | | |
| | (Phosphoprotein | | | |
| | phosphatase 1)— | | | |
| | Escherichia coli | | | |
| | O157:H7, 219 aa. | | | |
| F64945 | Phosphoprotein | 3 . . . 219 | 94/217 (43%) | 1e−40 |
| | phosphatase | 8 . . . 219 | 126/217 (57%) | |
| | (EC 3.1.3.16) 1, | | | |
| | serine/threonine | | | |
| | specific— | | | |
| | Escherichia coli | | | |
| | (strain K-12), | | | |
| | 219 aa. | | | |

[0378] PFam analysis predicts that the NOV11a protein contains the domains shown in the Table 11E.

TABLE 11E
Domain Analysis of NOV11a

| | | | |
|---|---|---|---|
| Pfam | NOV11a | Identities/Similarities | Expect |
| Domain | Match Region | for the Matched Region | Value |

No Significant Matches Found

### Example 12

[0379] The NOV12 clone was analyzed, and the nucleotide and encoded polypeptide sequences are shown in Table 12A.

TABLE 12A
NOV12 Sequence Analysis

| | SEQ ID NO:29 | 1540 bp |
|---|---|---|
| NOV12a, | CCAGACATGGGACTGGAGGACGAGCAAAAGATGCTTACCGAATCCGGAGATCCTGAGG | |
| CG122805-01 | AGGAGGAAGAGGAAGAGGAGGAATTAGTGATAGGACTGAGGCTTTCAGTGCATACTGG | |
| DNA | CAACCTTGGAAGGCAGGAATGTGAAACTTTTCCCTACTACTTAGCATCAGAATTGAAT | |
| Sequence | AAGGGAGACCGCATTCTGCCATTTCTGGCGGCAGTGTGGCTCTGCCAGCTGGCCTTCTGC | |
| | ACGGATCCCCTAACAACAGTGAGAGAGCAATGCGAGCAAGTTGGAGAAATGTGTAAGG | |
| | CCCGGGAGCGGCTAGAGCTCTGTGATGAGCGTGTATCCTCTCGATCACATACAGAAGA | |
| | GGATTGCACGGAGGAGCTCTTTGACTTCTTGCATGCGAGGGACCATTGCGTGGCCCAC | |
| | AAACTCTTTAACAACTTGAAATAAATGTGTGGACTTAATTCACCCCAGTCTTCATCAT | |
| | CTGGGCATCAGAATATTTCCTTATGGTTTTGGATGTACCATTTGTCTCTTATCTGTGT | |
| | AACTGTAAGTCACATGAA | |
| | ORF Start: ATG at 173 | ORF Stop: TAA at 428 |
| | SEQ ID NO:30 | 85 aa MW at 9953.2 kD |

| | |
|---|---|
| NOV12a, | MGDRILPFLAAVWLCQLAFCTDPLTTVREQCEQLEKCVKARERLELCDERVSSRSHTE |
| CG122805-01 | FDCTEELFDFLHARDHCVAHKLFNNLK |
| Protein | |
| Sequence | |

[0380] Further analysis of the NOV12a protein yielded the following properties shown in Table 12B.

TABLE 12B
Protein Sequence Properties NOV12a

| | |
|---|---|
| PSort | 0.6711 probability located in outside: 0.1000 probability |
| analysis: | located in endoplasmic reticulum (membrane); 0.1000 |
| | probability located in endoplasmic reticulum (lumen); |
| | 0.1000 probability located in lysosome (lumen) |
| SignalP | Cleavage site between residues 21 and 22 |
| analysis: | |

[0381] A search of the NOV12a protein against the Geneseq database, a proprietary database that contains sequences published in patents and patent publication, yielded several homolgous proteins shown in Table 12C.

TABLE 12C
Geneseq Results for NOV12a

| | | NOV12a | Identities/ | |
|---|---|---|---|---|
| | Protein/ | Residues/ | Similarities for | |
| Geneseq | Organism/Length | Match | the Matched | Expect |
| Identifier | [Patent #, Date] | Residues | Region | Value |
| ABG11307 | Novel human | 22 . . . 85 | 64/64 (100%) | 5e−33 |
| | diagnostic protein | 6 . . . 69 | 64/64 (100%) | |
| | #11298—Homo | | | |
| | sapiens, 69 aa. | | | |
| | [WO200175067-A2, | | | |
| | 11 OCT. 2001] | | | |
| AA013622 | Human polypeptide | 22 . . . 85 | 64/64 (100%) | 5e−33 |
| | SEQ ID NO | 30 . . . 93 | 64/64 (100%) | |
| | 27514—Homo | | | |
| | sapiens, 93 aa. | | | |
| | [WO200164835-A2, | | | |
| | 7 SEP. 2001] | | | |
| ABG11307 | Novel human | 22 . . . 85 | 64/64 (100%) | 5e−33 |
| | diagnostic protein | 6 . . . 69 | 64/64 (100%) | |
| | #11298—Homo | | | |
| | sapiens, 69 aa. | | | |
| | [WO200175067-A2, | | | |
| | 11 OCT. 2001] | | | |
| AA013554 | Human polypeptide | 22 . . . 85 | 57/64 (89%) | 4e−29 |
| | SEQ ID NO | 30 . . . 93 | 62/64 (96%) | |
| | 27446—Homo | | | |
| | sapiens, 93 aa. | | | |
| | [WO200164835-A2, | | | |
| | 7 SEP. 2001] | | | |
| AAO07352 | Human polypeptide | 22 . . . 85 | 53/64 (82%) | 2e−25 |
| | SEQ ID NO | 6 . . . 69 | 57/64 (88%) | |
| | 21244—Homo | | | |
| | sapiens, 75 aa. | | | |
| | [WO200164835-A2, | | | |
| | 7 SEP. 2001] | | | |

[0382] In a BLAST search of public sequence databases, the NOV12a protein was found to have homology to the proteins shown in the BLASTP data in Table 12D.

TABLE 12D
Public BLASTP Results for NOV12a

| | | NOV12a | Identities/ | |
|---|---|---|---|---|
| Protein | | Residues/ | Similarities for | |
| Accession | Protein/ | Match | the Matched | Expect |
| Number | Organism/Length | Residues | Portion | Value |
| P07919 | Ubiquinol-cytochrome | 22 . . . 85 | 64/64 (100%) | 1e−32 |
| | C reductase complex | 28 . . . 91 | 64/64 (100%) | |
| | 11 kDa protein, mito- | | | |
| | chondrial precursor | | | |
| | (EC 1 10.2.2) | | | |
| | (Mitochondrial hinge | | | |
| | protein) (Cytochrome | | | |
| | C1, nonheme 11 kDa | | | |
| | protein) (Complex III | | | |
| | subunit VIII)—Homo | | | |
| | sapiens (Human), | | | |
| | 91 aa. | | | |
| S00219 | ubiquinol-cytochrome- | 22 . . . 85 | 63/64 (98%) | 7e−32 |
| | c reductase (EC | 28 . . . 91 | 63/64 (98%) | |
| | 1.10.2.2) 11 K protein | | | |
| | precursor—human, | | | |
| | 91 aa. | | | |
| P00126 | Ubiquinol-cytochrome | 22 . . . 85 | 61/64 (95%) | 2e−30 |
| | C reductase complex | 15 . . . 78 | 62/64 (96%) | |
| | 11 kDa protein | | | |
| | (EC 1.10.2.2) | | | |
| | (Mitochondrial hinge | | | |
| | protein) (Cytochrome | | | |
| | C1, nonheme 11 kDa | | | |
| | protein) (Complex III | | | |
| | subunit VIII)—Bos | | | |
| | taurus (Bovine), 78 aa. | | | |
| Q8SPH5 | Ubiquinol-cytochrome | 22 . . . 85 | 60/64 (93%) | 7e−30 |
| | c reductase hinge | 28 . . . 91 | 62/64 (96%) | |
| | protein—Macaca | | | |
| | fascicularis (Crab | | | |
| | eating macaque) | | | |
| | (Cynomolgus | | | |
| | monkey), 91 aa. | | | |
| P99028 | Ubiquinol-cytochrome | 22 . . . 85 | 60/64 (93%) | 7e−30 |
| | C reductase complex | 26 . . . 89 | 60/64 (93%) | |
| | 11 kDa protein, mito- | | | |
| | chondrial precursor | | | |
| | (EC 1.10.2.2) | | | |
| | (Mitochondrial hinge | | | |
| | protein) (Cytochrome | | | |
| | C1, nonheme 11 kDa | | | |
| | protein) (Complex III | | | |
| | subunit VIII)—Mus | | | |
| | musculus (Mouse), | | | |
| | 89 aa. | | | |

[0383] PFam analysis predicts that the NOV12a protein contains the domains shown in the Table 12E.

TABLE 12E
Domain Analysis of NOV12a

| Pfam | NOV12a | Identities/Similarities | Expect |
|---|---|---|---|
| Domain | Match Region | for the Matched Region | Value |
| UCR_hinge | 21 . . . 85 | 50/65 (77%) | 7.2e−44 |
| | | 64/65 (98%) | |

### Example 13

[0384] The NOV13 clone was analyzed, and the nucleotide and encoded polypeptide sequences are shown in Table 13A.

TABLE 13A
NOV13 Sequence Analysis

| | SEQ ID NO:31 | 3057 bp |
|---|---|---|
| NOV13a, | CGCGCAGCTGCCCCCATGGCTTTGCGGGGCGCCGCGGGAGCGACCGACACCCCGGTGT | |
| CG123100-01 | CCTCGGCCGGGGGAGCCCCCGGCGGCTCAGCGTCCTCGTCGTCCACCTCCTCGGGCGG | |
| DNA | CTCGGCCTCGGCGGGCGCGGGGCTGTGGGCCGCGCTCTATGACTACGAGGCTCGCGGC | |
| Sequence | GAGGACGAGCTGAGCCTGCGGCGCGGCCAGCTGGTGGAGGTGCTGTCGCAGGACGCCG | |
| | CCGTGTCGGGCGACGAGGGCTGGTGGGCAGGCCAGGTGCAGCGGCGCCTCGGCATCTT | |
| | CCCCCCCAACTACGTGGCTCCCTGCCGCCCGGCCGCCAGCCCCGCGCCGCCGCCCTCG | |
| | CGGCCCAGCTCCCCGGTACACGTCGCCTTCGAGCGGCTGGAGCTGAAGGAGCTCATCG | |
| | GCGCTGGGGGCTTCGGGCAGGTGTACCGCGCCACCTGGCAGGGCCAGGAGGTGGCCGT | |
| | GAAGGCGGCGCGCCAGGACCCGGAGCAGGACGCGGCGGCGGCTGCCGAGAGCGTGCGG | |
| | CGCGAGGCTCGGCTCTTCGCCATGCTGCGGCACCCCAACATCATCGAGCTGCGCGGCG | |
| | TGTGCCTGCAGCAGCCGCACCTCTGCCTGGTGCTGGAGTTCGCCCGCGGCGGAGCGCT | |
| | CAACCGAGCGCTGGCCGCTGCCAACGCCGCCCCGGACCCGCGCGCGCCCGGCCCCCGC | |
| | CGCGCGCGCCGCATCCCTCCGCACGTGCTGGTCAACTGGGCCGTGCAGATAGCGCGGG | |
| | GCATGCTCTACCTGCATGAGGAGGCCTTCGTGCCCATCCTGCACCGGGACCTCAAGTC | |
| | CAGCAACATTTTGCTACTTGAGAAGATAGAACATGATGACATCTGCAATAAAACTTTG | |
| | AAGATTACAGATTTTGGGTTGGCGAGGGAATGGCACAGGACCACCAAAATGAGCACAG | |
| | CAGGCACCTATGCCTGGATGGCCCCCGAAGTGATCAAGTCTTCCTTGTTTTCTAAAGGG | |
| | AAGCGACATCTGGAGCTATGGAGTGCTGCTGTGGGAAAACTGCTCACCGGAGAAGTCCCC | |
| | TATCGGGGCATTGATGGCCTCGCCGTGGCTTATGGGGTAGCAGTCAATAAACTCACTT | |
| | TGCCCATTCCATCCACCTGCCCTGAGCCGTTTGCCAAGCTCATGAAAGAATGCTGGCA | |
| | ACAAGACCCTCATATTCGTCCATCGTTTGCCTTAATTCTCGAACAGTTGACTGCTATT | |
| | GAAGGGGCAGTGATGACTGAGATGCCTCAAGAATCTTTTCATTCCATGCAAGATGACT | |
| | GGAAACTAGAAATTCAACAAATGTTTGATGAGTTGAGAACAAAGGAAAAGGAGCTGCG | |
| | ATCCCGGGAAGAGGAGCTGACTCGGGCGGCTCTGCAGCAGAAGTCTCAGGAGGAGCTG | |
| | CTAAAGCGGCGTGAGCAGCAGCTGGCAGAGCGCGAGATCGACGTGCTGGAGCGGGAAC | |
| | TTAACATTCTGATATTCCAGCTAAACCAGGAGAAGCCCAAGGTAAAGAAGAGGAAGGG | |
| | CAAGTTTAAGAGAAGTCGTTTAAAGCTCAAAGATGGACATCGAATCAGTTTACCAACA | |
| | GATTTCCAGCACAAGATAACCGTGCAGGCCTCTCCCAACTTGGACAAACGGCGGAGCC | |
| | TGAACAGCAGCAGTTCCAGTCCCCCGAGCAGCCCCACAATGATGCCCCGACTCCGAGC | |
| | CATACAGTGTGAGCTTGATGAAAGCAATAAAACTTGGGGAAGGAACACAGTCTTTCGA | |
| | CAAGAAGAATTTGAGGATGTAAAAAGGAATTTTAAGAAAAAAGGTTGTACCTGGGGAC | |
| | CAAGAAGAATTTGAGGATGTAAAAAGGAATTTTAAGAAAAAAGGTTGTACCTGGGGAC | |
| | CAAATTCCATTCAAATGAAAGATCCTAGTCAGGCCTACATTGATCTACCTCTTGGGAA | |
| | AGATGCTCAGAGAGAGAATCCTGCAGAAGCTGAAAGCTGGGAGGAGGCAGCCTCTGCG | |
| | AATGCTGCCACAGTCTCCATTGAGATGACTCCTACGAATAGTCTGAGTAGATCCCCCC | |
| | AGAGAAAGAAAACGGAGTCAGCTCTGTATGGGTGCACCGTCCTTCTGGCATCGGTGGC | |
| | TCTGGGACTGGACCTCAGAGAGCTTCATAAGCACAGGCTGCTGAAGAACCGTTGCCC | |
| | AAGGAAGAGAAGAAGAAACGAGAGGGAATCTTCCAGCGGGCTTCCAAGTCCCGCAGAA | |
| | GCGCCAGTCCTCCCACAAGCCTGCCATCCACCTGTGGGGAGGCCAGCAGCCCACCCTC | |
| | CCTGCCACTGTCAAGTGCCCTGGGCATCCTCTCCACACCTTCTTTCTCCACAAAGTGC | |
| | CTGCTGCAGATGGACAGTGAAGATCCACTGGTGGACAGTGCACCTGTCACTTGTGACT | |
| | CTGAGATGCTCACTCCGGATTTTTGTCCCACTGCCCCAGGAAGTGGTCGTGAGCCAGC | |
| | CCTCATGCCAAGACTTGACACTGATTGTAGTGTATCAAGAAACTTGCCGTCTTCCTTC | |
| | CTACAGCAGACATGTGGGAATGTACCTTACTGTGCTTCTTCAAAACATAGACCGTCAC | |
| | ATCACAGACGGACCATGTCTGATGGAAATCCGACCCCAAGTAGGTTGCTGCCACTCTG | |
| | CCCCTCACCTGCTCCTCACAGTCATCTGCCAAGGGAGGTCTCACCCAAGAAGCACAGC | |
| | ACTGTCCACATCGTGCCTCAGCGTCGCCCTGCCTCCCTGAGAAGCCGCTCAGATCTGC | |
| | CTCAGGCTTACCCACAGACAGCAGTGTCTCAGCTGGCACAGACTGCCTGTGTAGTGGG | |
| | TCGCCCAGGACCACATCCCACCCATTCCTCGCTGCCAAGGAGAGAACTAAATCCCAT | |
| | GTGCCTTCATTACTGGATGCTGACGTGGAAGGTCAGAGCAGGGACTACACTGTGCCAC | |
| | TGTGCAGAATGAGGAGCAAAACCAGCCGGCCATCTATATATGAACTGGAGAAGAATT | |
| | CCTGTCTTAAAAGTGCCTTACTGTTGTTTAAGCATTTTTTTAAGGTGAACAAATG | |
| | AACACAATGTATCTACCTTTGAACTGTTTCATGCTGCTGTGTTTTCAAAAGCTGTGGC | |
| | CATGTTCCTAAATTAGTAAGATATATCCAGCTTCTCAAAAA | |
| | ORF Start: ATG at 16 | ORF Stop: TAA at 2908 |
| | SEQ ID NO:32 | 964 aa MW at 106256.4 kD |

| | |
|---|---|
| NOV13a, | MALRGAAGATDTPVSSAGGAPGGSASSSSTSSGGSASAGAGLWAALYDYEARGEDELS |
| CG123100-01 | LRRGQLVEVLSQDAAVSGDEGWWAGQVQRRLGIFPANYVAPCRRAASPAPPPSRRSSR |
| Protein | VHVAFERLELKFLIGAGGFGQVYRATWQGQEVAVKAARQDPFQDAAAAAESVRREARL |
| Sequence | FAMLRHPNIIFLRGVCLQQPHLCLVLEFARGGALNRALAAANAAAPDPRARGPRRARRI |
| | PPHVLVNWAVQIARGMLYLHFEAFVPILHRDLLKSSNILLLEKIEHDDICNKTLKITDF |
| | GLAREWHRTTKMSTAGTYAWMAPEVIKSSLFSKGSDIWSYGVLLWEAALLTGEVPYRGID |
| | GLAVAYGVAVNKLTLRIPSTCPEPFAKLMKECWQQDPHIRPSFALILEQLTAIEGAVM |
| | TEMPQESFHSMQDDWKLEIQQMFDELRTKEKELRSREEELTRAALQQKSQEELLKRRE |
| | QQLAERAAIDVLERELNTLTFQLNQEKPKVKKRKGKFKRSRLKLKDGHRISLPTDFQHK |
| | ITVQASPNLDKRRSLNSSSSSPPSSPTMMPRLRAIQCELDESNKTWGRNTVFRQEEFE |
| | DVKRNFKKKGCTWGRNSIQMKDRSQAYIDLPLGKDAQRENPAEAESWEEAASANAATV |
| | SIEMTPTNSLSRSPQRKKTESALYGCTVLLASVALGLDLRELHKAQAAEEPLPKEEKK |
| | KREGIFQRASKSRRSASPPTSLPSTCGEASSRPSLPLSSALGILSTPSFSTKCLLQMD |
| | SEDPLVDSAPVTCDSEMLTPDFCPTAPGSGREPALMPRLDTDCSVSRNLPSSFLQQTC |
| | GNVPYCASSKHRPSHHRRTMSDGNPTPSRLLPLCPSPAPHSHLPREVSPKKHSTVHIV |
| | PQRRPASLRSRSDLPQAYPQTAVSQLAQTACVVGRPGPHPTQFLAAKERTKSHVPSLL |
| | DADVEGQSRDYTVPLCRMRSKTSRPSIYELEKEFLS |

[0385] Further analysis of the NOV13a protein yielded the following properties shown in Table 13B.

TABLE 13B
Protein Sequence Properties NOV13a

| | |
|---|---|
| PSort | 0.8500 probability located in endoplasmic reticulum |
| analysis: | (membrane); 0.8000 probability located in nucleus; 0.4400 |
| | probability located in plasma membrane; 0.3000 probability |
| | located in microbody (peroxisome) |
| SignalP | No Known Signal Sequence Predicted |
| analysis: | |

[0386] A search of the NOV13a protein against the Geneseq database, a proprietary database that contains sequences published in patents and patent publication, yielded several homologous proteins shown in Table 13C.

TABLE 13C
Geneseq Results for NOV13a

| | | | Identities/ | |
|---|---|---|---|---|
| | | NOV13a | Similarities | |
| | Protein/ | Residues/ | for the | |
| Geneseq | Organism/Length | Match | Matched | Expect |
| Identifier | [Patent #, Date] | Residues | Region | Value |
| AAB85513 | Human protein | 1 . . . 657 | 632/719 | 0.0 |
| | kinase SGK067— | | (87%) | |
| | Homo sapiens, | 1 . . . 719 | 641/719 | |
| | 719 aa. | | (88%) | |
| | [WO200155356- | | | |
| | A2, 2 AUG. | | | |
| | 2001] | | | |
| AAE21717 | Human PKIN-12 | 19 . . . 964 | 531/1115 | 0.0 |
| | protein—Homo | | (47%) | |
| | sapiens, 1097 aa. | 24 . . . 1097 | 662/1115 | |
| | [WO200218557- | | (58%) | |
| | A2, 7 MAR. | | | |
| | 2002] | | | |
| AAE11775 | Human kinase | 19 . . . 964 | 525/1069 | 0.0 |
| | (PKIN)-9 | | (49%) | |
| | protein—Homo | 24 . . . 1046 | 663/1069 | |
| | sapiens, 1046 aa. | | (61%) | |
| | [WO200181555- | | | |
| | A2, 1 NOV. | | | |
| | 2001] | | | |
| ABG11701 | Novel human | 516 . . . 951 | 389/510 | 0.0 |
| | diagnostic protein | | (76%) | |
| | #11692—Homo | 25 . . . 533 | 404/510 | |
| | sapiens, 639 aa. | | (78%) | |
| | [WO200175067- | | | |
| | A2, 11 OCT. | | | |
| | 2001] | | | |
| ABG11701 | Novel human | 516 . . . 951 | 389/510 | 0.0 |
| | diagnostic protein | | (76%) | |
| | #11692—Homo | 25 . . . 533 | 404/510 | |
| | sapiens, 639 aa | | (78%) | |
| | [WO200175067- | | | |
| | A2, 11 OCT. | | | |
| | 2001] | | | |

[0387] fit a BLAST search of public sequence databases, the NOV13a protein was found to have homology to the proteins shown in the BLASTP data in Table 13D.

TABLE 13D
Public BLASTP Results for NOV13a

| | | NOV13a | Identities/ | |
|---|---|---|---|---|
| Protein | | Residues/ | Similarities for | |
| Accession | Protein/ | Match | the Matched | Expect |
| Number | Organism/Length | Residues | Portion | Value |
| Q8WWN1 | Mixed lineage | 1 . . . 964 | 928/1036 (89%) | 0.0 |
| | kinase 4beta— | 1 . . . 1036 | 941/1036 (90%) | |
| | Homo sapiens | | | |
| | (Human), | | | |
| | 1036 aa. | | | |
| Q8VDG6 | Similar to | 1 . . . 964 | 656/1035 (63%) | 0.0 |
| | mitogen-activated | 1 . . . 1001 | 735/1035 (70%) | |
| | protein kinase | | | |
| | kinase kinase 9— | | | |
| | Mus musculus | | | |
| | (Mouse), 1001 aa. | | | |
| Q9H1Y7 | DJ862P8.3 | 1 . . . 561 | 560/561 (99%) | 0.0 |
| | (Similar to | 1 . . . 561 | 561/561 (99%) | |
| | MAP3K10 | | | |
| | (Mitogen- | | | |
| | activated protein | | | |
| | kinase kinase | | | |
| | kinase 10))— | | | |
| | Homo sapiens | | | |
| | (Human), 564 aa | | | |
| | (fragment). | | | |
| Q8WWN2 | Mixed lineage | 1 . . . 561 | 558/561 (99%) | 0.0 |
| | kinase 4alpha— | 1 . . . 561 | 560/561 (99%) | |
| | Homo sapiens | | | |
| | (Human), 570 aa. | | | |
| Q9H2N5 | Mixed lineage | 43 . . . 730 | 413/701 (58%) | 0.0 |
| | kinase MLK1— | 5 . . . 675 | 511/701 (71%) | |
| | Homo sapiens | | | |
| | (Human), 1066 aa | | | |
| | (fragment). | | | |

[0388] PFam analysis predicts th at the NOV13a protein contains the domains shown in the Table 13E.

TABLE 13E
Domain Analysis of NOV13a

| Pfam | NOV13a | Identities/Similarities | Expect |
|---|---|---|---|
| Domain | Match Region | for the Matched Region | Value |
| SH3 | 41 . . . 100 | 23/63 (37%) | 3.1e−13 |
| | | 48/63 (76%) | |
| Pkinase | 124 . . . 398 | 101/314 (32%) | 4e−87 |
| | | 221/314 (70%) | |

### Example 14

[0390] The NOV14 clone as analyzed, and the nucleotide and encoded polypeptide sequences are shown in Table 14A.

TABLE 14A
NOV14 Sequence Analysis

| | SEQ ID NO:33 | 9930 bp |
|---|---|---|
| NOV14a, | CCGCGGGTGCCCCCGTGGCCGCCCAGTTCCGGCGTCCCCCCAGCCCAGCTCTCAGTGG | |
| CG124136-01 | CCATGCAGAAAGCCCGGGGCACGCGAGGCGAGGATGCGGGCACGAGGGCACCCCCCAG | |
| DNA | CCCCGGAGTGCCCCCGAAAAGGGCCAAGGTGGGGGCCGGCGGCGGGGCTCCTGTGGCC | |
| Sequence | GTGGCCGGGGCGCCAGTCTTCCTGCGGCCCCTGAAGAACGCGGCGGTGTGCGCGGGCA | |
| | GCGACGTGCGGCTGCGGGTGGTGGTGAGCGGGACGCCCCATCCCATCCTCCGCTGGTT | |
| | CCGGGATGGGCAGCTCCTGCCCGCGCCGGCCCCCGAGCCCAGCTGCCTGTGGCTGCGG | |
| | CGCTGCGGGGCGCAGGACGCCGGCGTGTACAGCTGCATGGCCCAGAACGAGCGGGGCC | |
| | GGGCCTCCTGCGAGGCGGTGCTCACAGTGCTGGAGGTCGGAGACTCAGAGACGGCTGA | |
| | GGATGACATCAGCGATGTGCAGGGAACCCAGCGCCTGGAGCTTCGGGATGACGGGGCC | |
| | TTCAGCACCCCCACGGGGGGTTCTGACACCCTGGTGGGCACCTCCCTGGACACACCCC | |
| | CGACCTCCGTGACAGGCACCTCAGAGGAGCAAGTGAGCTGGTGGGGCAGCGGGCAGAC | |
| | GGTCCTGGAGCAGGAAGCGGGCAGTGGGGGTGGCACCCGCCGCCTCCCGGGCAGCCCA | |
| | AGGCAAGCACAGGCAACCGGGGCCGGGCCACGGCACCTGGGGGTGGAGCCGCTGGTGC | |
| | GGGCATCTCGAGCTAATCTGGTGGGCGCAAGCTGGGGGTCAGAGGATAGCCTTTCCGT | |
| | GGCCAGTGACCTGTACGGCAGCGCATTCAGCCTGTACAGAGGACGGGCGCTCTCTATC | |
| | CACGTCAGCCTCCCTCAGAGCGGGTTGCGCAGGGAGGAGCCCGACCTTCAGCCTCAAC | |
| | TGGCCAGCGAAGCCCCACCCCGCCCTGCCCAGCCGCCTCCTTCCAAATCCGCGCTGCT | |
| | CCCCCCACCGTCCCCTCGGGTCGGGAAGCGGTCCCCGCCGGGACCCCCGGCCCAGCCC | |
| | GCGGCCACCCCCACGTCGCCCCACCGTCGCACTCAGGAGCCTGTGCTGCCCGAGGACA | |
| | CCACCACCGAAGAGAAGCGAGGGAAGAAGTCCAAGTCGTCCGGGCCCTCCCTGGCGGG | |
| | CACCGCGGAATCCCGACCCCAGACGCCACTGAGCGAGGCCTCAGGCCGCCTGTCGGCG | |
| | TCTTCGAGGAGCGACGGCGCAGCCTGGAGCGCAGCGACTCGCCGCCGGCGCCCCTGCG | |
| | GCCCTGGGTGCCCCTGCGCAAGGCCCGCTCTCTGGAGCAGCCCAAGTCGGAGCGCGGC | |
| | GCACCGTGGGGCACCCCCGGGGCCTCGCAGGAAGAACTGCGGGCGCCAGGCAGCGTGG | |
| | CCGAGCGGCGCCGCCTGTTCCAGCAGIAAAGCGGCCTCGCTGGACGAGCGCACGCGTCA | |
| | GCGCAGCCCGGCCTCAGACCTCGAGCTGCGCTTCGCCCAGGAGCTGGGCCGCATCCGC | |
| | CGCTCCACGTCGCGGGAGGAGCTGGTGCGCTCGCACGAGTCCCTGCGCGCCACGCTGC | |
| | AGCGTGCCCCATCCCCTCGAGAGCCCGGCGAGCCCCCGCTCTTCTCTCGGCCCTCCAC | |
| | CCCCAAGACATCGCGGGCCGTGAGCCCCGCCGCCGCCCAGCCGCCCTCTCCGAGCAGC | |
| | GCGGAGAAGCCGGGGGACGAGCCTGGGAGGCCCAGGAGCCGCGGGCCGGCGGGCAGGA | |
| | CAGAGCCGGGGGAAGGCCCGCAGCAGGAGGTTAGGCGTCGGGACCAATTCCCGCTGAC | |
| | CCGGAGCAGAGCCATCCAGGAGTGCAGGAGCCCTGTGCCGCCCCCCGCCGCCGATCCC | |
| | CCAGAGGCCAGGACGAAAGCACCCCCCGGTCGGAAGCCGGAGCCCCCGGCGCAGGCCG | |
| | TGCGCTTCCTGCCCTGGGCCACGCCGGGCCTGGAGGGCGCTGCTGTACCCCAGACCTT | |
| | GGAGAAGAACAGGGCGGGGCCTGAGGCAGAGAAGAGGCTTCGCAGAGGGCCGGAGGAG | |
| | GACGGTCCCTGGGGGCCCTGGGACCGCCGAGGGGCCCGCAGCCAGGGCAAAGGTCGCC | |
| | GGGCCCGGCCCACCTCCCCTGAGCTCGAGTCTTCGGATGACTCCTACGTGTCCGCTGG | |
| | AGAAGAGCCCCTAGAGGCCCCTGTGTTTGAGATCCCCCTGCAGAATGTGGTGGTGGCA | |
| | CCAGGGGCAGATGTGCTGCTCAAGTGTATCATCACTGCCAACCCCCCGCCCCAAGTGT | |
| | CCTGGCACAAGGATGCGTCAGCGCTGCGCAGCGAGGGCCGCCTCCTCCTCCGGGCTGA | |
| | GGGTGAGCGGCACACCCTGCTGCTCAGGGAGGCCAGGGCAGCAGATGCCGGGAGCTAT | |
| | ATGGCCACCGCCACCAACGAGCTGGGCCAGGCCACCTGTGCCGCCTCACTGACCCTGA | |
| | GACCCGGTGGGTCTACATCCCCTTTCAGCAGCCCCATCACCTCCGACGAGGAATACCT | |
| | GAGCCCCCCAGAGGAGTTCCCAGAGCCTGGGGAGACCTGGCCGCGAACCCCCACCATG | |
| | AAGCCCAGTCCCAGCCAGAACCGCCGTTCTTCTGACACTGGCTCCAAGGCACCCCCCA | |
| | CCTTCAAGGTCTCACTTATGGACCAGTCAGTAAGAGAAGGCCAAGATGTCATCATGAG | |
| | CATCCGCGTGCAGGGGGAGCCCAAGCCTGTGGTCTCCTGGCTGAGAAACCGCCAGCCC | |
| | GTGCGCCCAGACCAGCGGCGCTTTGCGGAGGAGGCTGAGGGTCGGCTCTGCCGGCTGC | |
| | GGATCCTGGCTGCAGAGCGTGGCGATGCTGGTTTCTACACTTGCAAAGCGGTCAATGA | |
| | GTATGGTGCTCGGCAGTGCGAGGCCCGCTTGAGGTCCGAGGACGTGGACGTGGGGGCC | |
| | GGGGAGATGGCGCTGTTTGAGTGCCTGGTGGCGGGGCCCACTGACGTGGAGGTGGATT | |
| | GGCTGTGCCGTGGCCGCCTGCTGCAGCCTGCACTGCTCAAATGCAAGATGCATTTCGA | |
| | TGGCCGCAAATGCAAGCTGCTACTTACATCTGTACATGAGGACGACAGTGGCGTCTAC | |
| | ACCTGCAAGCTCAGCACGGCCAAAGATGAGCTGACCTGCAGTGCCCGCCTGACCGTGC | |
| | GGCCCTCGTTGGCACCCCTGTTCACACGGCTGCTGGAAGATGTGGAGGTGTTGGAGGG | |
| | CCGAGCTGCCCCTTTCGACTGCAAGATCAGTGGCACCCCGCCCCCTGTTGTTACCTGG | |
| | ACTCATTTTGGCTGCCCCATGGAGGAGAGTGAGAACTTGCGGCTGCGGCAGGACGGGG | |
| | GTCTGCACTCACTGCACATTGCCCATGTGGCCAGCGAGGACGAGGGGCTCTATGCGGT | |
| | CAGTGCTGTTAACACCCATGGCCAGGCCCACTGCTCAGCCCAGCTCTATGTAGAAGAG | |
| | CCCCGGACAGCCGCCTCAGGCCCCAGCTCCAAGCTGGAGAAGATGCCATCCATTCCCG | |
| | AGGAGCCAGAGCAGGGTGAGCTGGAGCGGCTGTCCATTCCTGACTTCCTGCGGCCACT | |
| | GCAGGACCTGGAGGTGGGACTGGCCAAGGAGGCCATGCTAGAGTGCCAGGTGACCGGC | |
| | CTGCCCTACCCCACCATCAGCTGGTTCCACAATGGCCACCGCATCCAGAGCAGCGACG | |
| | ACCGGCGCATGACACAGTACAGGGATGTCCATCGCTTGGTGTTCCCTGCCGTGGGGCC | |
| | TCAGCACGCCGGTGTCTACAAGAGCGTCATTGCCAACAAGCTGGGCAAAGCTGCCTGC | |
| | TATGCCCACCTGTATGTCACAGATGTGGTCCCAGGCCCTCCAGATGGCGCCCCGCAGG | |
| | TGGTGGCTGTGACGGGGAGGATGGTCACACTCACATGGAACCCCCCCAGGAGTCTGGA | |
| | CATGGCCATCGACCCGGACTCCCTGACGTACACAGTGCAGCACCAGGTGCTGGGCTCG | |
| | GACCAGTGGACGGCACTGGTCACAGGCCTGCGGGAGCCAGGGTGGGCAGCCACAGGGC | |
| | TGCGTAAGGGGGTCCAGCACATCTTCCGGGTCCTCAGCACCACTGTCAAGAGCAGCAG | |
| | CAAGCCCTCACCCCCTTCTGAGCCTGTGCAGCTGCTGGAGCACGGCCCAACCCTGGAG | |
| | GAGGCCCCTGCCATGCTGGACAAACCAGACATCGTGTATGTGGTGGAGGGACAGCCTG | |
| | CCAGCGTCACCGTCACATTCAACCATGTGGAGGCCCAGGTCGTCTGGAGGAGCTGCCG | |
| | AGGGGCCCTCCTAGAGGCACGGGCCGGTGTGTACGAGCTGAGCCAGCCAGATGATGAC | |
| | CAGTACTGTCTTCGGATCTGCCGGGTGAGCCGCCGGGACATGGGGGCCCTCACCTGCA | |
| | CCGCCCGAAACCGTCACGGCACACAGACCTGCTCGGTCACATTGGAGCTGGCAGAGGC | |
| | CCCTCGGTTTGAGTCCATCATGGAGGACGTGGAGGTGGGGGCTGGGGAAACTGCTCGC | |
| | TTTGCGGTGGTGGTCGAGGGAAAACCACTGCCGGACATCATGTGGTACAAGGACGAGG | |
| | TGCTGCTGACCGAGAGCAGCCATGTGAGCTTCGTGTACGAGGAGAATGAGTGCTCCCT | |
| | GGTGGTGCTCAGCACGGGGGCCCAGGATGGAGGCGTCTACACCTGCACCGCCCAGAAC | |
| | CTGGCGGGTGAGGTCTCCTGCAAAGCAGAGTTGGCTGTGCATTCAGCTCAGACAGCTA | |
| | TGGAGGTCGAGGGGGTCGGGGAGGATGAGGACCATCGAGGAAGGAGACTCAGCGACTT | |
| | TTATGACATCCACCAGGAGATCGGCAGGGGTGCTTTCTCCTACTTGCGGCGCATAGTG | |
| | GAGCGTAGCTCCGGCCTGGAGTTTGCGGCCAAGTTCATCCCCAGCCAGGCCAAGCCAA | |
| | AGGCATCAGCGCGTCGGGAGGCCCGGCTGCTGGCCAGGCTCCAGCACGACTGTGTCCT | |
| | CTACTTCCATGAGGCCTTCGAGAGGCGCCGGGGACTGGTCATTGTCACCGAGCTCTGC | |
| | ACAGAGGAGCTGCTGGAGCGAATCGCCAGGAAACCCACCGTGTGTGAGTCTGAGATCC | |
| | GGGCCTATATGCGGCAGGTGCTAGAGGGAATACACTACCTGCACCAGAGCCACGTGCT | |
| | GCACCTCGATGTCAAGCCTGAGAACCTGCTGGTGTGGGATGGTGCTGCGGGCGAGCAG | |
| | CAGGTGCGGATCTGTGACTTTGGGAATGCCCAGGAGCTGACTCCAGGAGAGCCCCAGT | |
| | ACTGCCAGTATGGCACACCTGAGTTTGTAGCACCCGAGATTGTCAATCAGAGCCCCGT | |
| | GTCTGGAGTCACTGACATCTGGCCTGTGGGTGTTGTTGCCTTCCTGCTGTCTGACAGG | |
| | AATCTCCCCGTTTGTTGGGGAAATGACCGGACAACATTGATGAACATCCGAAACTACA | |
| | ACGTGGCCTTCGAGGAGACCACATTCCTGAGCCTGAGCAGGGAGGCCCGGGGCTTCCT | |
| | CATCAAAGTGTTGGTGCAGGACCGGCTGAGACCTACCGCAGAAGAGACCCTAGAACAT | |
| | CCTTGGTTCAAAACTCAGGCAAAGGGCGCAGAGGTGAGCACGGATCACCTGAAGCTAT | |
| | TCCTCTCCCGGCGGAGGTGGCAGCGCTCCCAGATCAGCTACAAATGCCACCTGGTGCT | |
| | GCGCCCCATCCCCGAGCTGCTGCGGGCCCCCCCAGAGCGGGTGTGGGTGACCATGCCC | |
| | AGAAGGCCACCCCCCAGTGGGGGGCTCTCATCCTCCTCGGATTCTGAAGAGGAAGAGC | |
| | TGGAAGAGCTGCCCTCAGTGCCCCGCCCACTGCAGCCCGAGTTCTCTGGCTCCCGGGT | |
| | GTCCCTCACAGACATTCCCACTGAGGATGAGGCCCTGGGGACCCCAGAGACTGGGGCT | |
| | GCCACCCCCATGGACTGGCAGGAGCAGGGAAGGGCTCCCTCTCAGGACCAGGAGGCTC | |
| | CCAGCCCAGAGGCCCTCCCCTCCCCAGGCCAGGAGCCCGCAGCTGGGGCTAGCCCCAG | |
| | GCGGGGAGAGCTCCGCAGGGGCAGCTCGGCTGAGAGCGCCCTGCCCCGGGCCGGGCCG | |
| | CGGGAGCTGGGCCGGGGCCTGCACAAGGCGGCGTCTGTGGAGCTGCCGCAGCGCCGGA | |
| | GCCCCGGCCCGGGAGCCACCCGCCTGGCCCGGGGAGGCCTGGGTGAGGGCGAGTATGC | |
| | CCAGAGGCTGCAGGCCCTGCGCCAGCGGCTGCTGCGGGGAGGCCCCGAGGATGGCAAG | |
| | GTCAGCGGCCTCAGGGGTCCCCTGCTGGAGAGCCTGGGGGGCCGTGCTCGGGACCCCC | |
| | GGATGGCACGAGCTGCCTCCAGCGAGGCAGCGCCCCACCACCAGCCCCCACTCGAGAA | |
| | CCGGGGCCTGCAAAAGAGCAGCAGCTTCTCCCAGGGTGAGGCGGAGCCCCGGGGCCGG | |
| | CACCGCCGAGCGGGGGCGCCCCTCGAGATCCCCGTGGCCAGGCTTGGGGCCCGTAGGC | |
| | TACAGGAGTCTCCTTCCCTGTCTGCCCTCAGCGAGGCCCAGCCATCCAGCCCTGCACG | |
| | GCCCAGCGCCCCCAAACCCAGTACCCCTAAGTCTGCAGAACCTTCTGCCACCACACCT | |
| | AGTGATGCTCCGCAGCCCCCCGCACCCCAGCCTGCCCAAGACAAGGCTCCAGAGCCCA | |
| | GGCCAGAACCAGTCCGAGCCTCCAAGCCTGCACCACCCCCCCAGGCCCTGCAAACCCT | |
| | AGCGCTGCCCCTCACACCCTATGCTCAGATCATTCAGTCCCTCCAGCTGTCAGGCCAC | |
| | GCCCAGGGCCCCTCGCAGGGCCCTGCCGCGCCGCCTTCAGAGCCCAAGCCCCACGCTG | |
| | CTGTCTTTGCCAGGGTGGCCTCCCCACCTCCGGGAGCCCCCGAGAAGCGCGTGCCCTC | |
| | AGCCGGGGGTCCCCCGGTGCTAGCCGAGAAAGCCCGAGTTCCCACGGTGCCCCCCAGG | |
| | CCAGGCAGCAGTCTCAGTAGCAGCATCGAAAACTTGGAGTCGGAGGCCGTGTTCGAGG | |
| | CCAAGTTCAAGCGCAGCCGCGAGTCGCCCCTGTCGCTGGGGCTGCGGCTGCTGAGCCG | |
| | TTCGCGCTCGGAGGAGCGCGGCCCCTTCCGTGGGGCCGAGGAGGAGGATGGCATATAC | |
| | CGGCCCAGCCCGGCGGGGACCCCGCTGGAGCTGGTGCGACGGCCTGAGCGCTCACGCT | |
| | CGGTGCAGGACCTCAGGGCTGTCGGAGAGCCTGGCCTCGTCCGCCGCCTCTCGCTGTC | |
| | ACTGTCCCAGCGGCTGCGGCGGACCCCTCCCGCGCAGCGCCACCCGGCCTGGGAGGCC | |
| | CGCGGCGGGGACGGAGAGAGCTCGGAGGGCGGGAGCTCGGCGCGGGGCTCCCCGGTGC | |
| | TGGCGATGCGCAGGCGGCTGAGCTTCACCCTGGAGCGGCTGTCCAGCCGATTGCAGCG | |
| | CAGTGGCAGCAGCGAGGACTCGGGGGGCGCGTCGGGCCGCAGCACGCCGCTGTTCGGA | |
| | CCGCTTCGCAGGGCCACGTCCGAGGGCGAGAGTCTGCGGCGCCTTGGCCTTCCGCACA | |
| | ACCAGTTGGCCGCCCAGGCCGGCGCCACCACGCCTTCCGCCGAGTCCCTGGGCTCCGA | |
| | GGCCAGCGCCACGTCGGGCTCCTCAGCCCCAGGGGAAAGCCGAAGCCGGCTCCGCTGG | |
| | GGCTTCTCTCGGCCGCGGAAGGACAAGGGGTTATCGCCACCAPACCTCTCTGCCAGCG | |
| | TCCAGGAGGAGTTGGGTCACCAGTACGTGCGCAGTGAGTCAGACTTCCCCCCAGTCTT | |
| | CCACATCAAACTCAAGGACCAGGTGCTGCTGGAGGGGGAGGCAGCCACCCTGCTCTGC | |
| | CTGCCAGCGGCCTGCCCTGCACCGCACATCTCCTGGATGAAAGACAAGAAGTCCTTGA | |
| | GGTCAGAGCCCTCAGTGATCATCGTGTCCTGCAAAGATGGGCGGCAGCTGCTCAGCAT | |
| | CCCCCGGGCGGGCAAGCGGCACGCCGGTCTCTATGAGTGCTCGGCCACCAACGTACTG | |
| | GGCAGCATCACCAGCTCCTGTACCGTGGCTGTGGCCCGAGTCCCAGGAAAGCTAGCTC | |
| | CTCCAGAGGTACCCCAGACCTACCAGGACACGGCGCTGGTGCTGTGGAAGCCGGGAGA | |
| | CAGCCGGGCACCTTGCACGTATACGCTGGAGCGGCGAGTGGATGGGGAGTCTGTGTGG | |
| | CACCCTGTGAGCTCAGGCATCCCCGACTGTTACTACAACGTGACCCACCTGCCAGTTG | |
| | GCGTGACTGTGAGGTTCCGTGTGGCCTGTGCCAACCGTGCTGGGCAGGGGCCCTTCAG | |
| | CAACTCTTCTGAGAAGGTCTTTGTCAGGGGTACTCAAGATTCTTCAGCTGTGCCATCT | |
| | GCTGCCCACCAAGAGGCCCCTGTCACCTCAAGGTCAGTCAGGGCCCGGCCTCCTGACT | |
| | CTCCTACCTCACTGGCCTCACCCCTAGCTCCTGCTGCCCCCACACCCCCGTCAGTCAC | |
| | TGTCAGCCCCTCATCTCCCCCCACACCTCCTAGCCAGGCCTTGTCCTCGCTCAAGGCT | |
| | GTGGGTCCACCACCCCAAACCCCTCCACGAAGACACAGGGGCCTGCAGGCTGCCCGGC | |
| | CAGCGGAGCCCACCCTACCCAGTACCCACGTCACCCCAAGTGAGCCCCAGCCTTTCGT | |
| | CCTTGACACTGGGACCCCGATCCCAGCCTCCACTCCTCAAGGGGTTAAACCAGTGTCT | |
| | TCCTCTACTCCTGTGTATGTGGTGACTTCCTTTGTGTCTGCACCACCAGCCCCTGAGC | |
| | CCCCAGCCCCTGAGCCCCCTCCTGAGCCTACCAAGGTGACTGTGCAGAGCCTCAGCCC | |
| | GGCCAAGGAGGTGGTCAGCTCCCCTGGGAGCAGTCCCCGkAGCTCTCCCAGGCCTGAG | |
| | GGTACCACTCTTCGACAGGGTCCCCCTCAGkAACCCTACACCTTCCTGGAGGAGAAAG | |
| | CCAGGGGCCGCTTTGGTGTTGTGCGAGCGTGCCGGGAGAATGCCACGGGGCGAACGTT | |
| | CGTGGCCAAGATCGTGCCCTATGCTGCCGAGGGCAAGCCGCGGGTCCTGCAGGAGTAC | |
| | GAGGTGCTGCGGACCCTGCACCACGAGCGGATCGTGTCCCTGCACGAGGCCTACATCA | |
| | CCCCTCGGTACCTCGTGCTCATTGCTGAGAGCTGTGGCAACCGGGAACTCCTCTGTGG | |
| | GCTCAGTGACAGGTTCCGGTATTCTGAGGATGACGTGGCCACTTACATGGTGCAGCTG | |
| | CTACAAGGCCTGGACTACCTCCACGGCCACCACGTCCTCCACCTAGACATCAAGCCAG | |
| | ACAACCTGCTGCTGGCCCCTGACAATGCCCTCAAGATTGTGGACTTTGGCAGTGCCCA | |
| | GCCCTACAACCCCCAGGCCCTTAGGCCCCTTGGCCACCGCACGGTGCACCTGACACTA | |
| | ATGTCCTTCTGGGTCTGGGTGTTGGCCTCCGGTCTGCATATGTCAATCAAGCTATCTT | |
| | CCCCAACAGGCTCAGTGGACGCTCCCCGTTCTATGAGCCAGACCCCCAGGAAACGGAG | |
| | GCTCGGATTGTGGGGGGCCGCTTTGATGCCTTCCAGCTGTACCCCAATACATCCCAGA | |
| | GCGCCACCCTCTTCTTGCGAAAGGTTCTCTCTGTACATCCCTGGTGAGTGAGCCCCAC | |
| | ACCTGCTATCCCCCAGTGTTACCTGCCCCTGGCCTGGCCTGTGCCAGAGATCTCCCAG | |
| | CTCCTCCCCTGCTCCTAGGAAGAAGTCTGCTGCTTCTACTAAATGGTCATACTACCCA | |
| | CCATTTAAAGCCTGAGGCAGCCCCGTGCAAGGCAGACTCACTGTCCCCATTCCGGCGA | |
| | CTGGGGAACTGAGCTCTTGAGCTGCCCAAGATCACACATGTAGGGGTGGGATCCAGGA | |
| | CTGGGACATGGGTCTGCGGGAGGACAGAGCCCCGGCAGCTCCCAGAGCTTCCTTCCAG | |
| | GTTCATCATCCC | |
| | ORF Start: ATG at 61 | ORF Stop: TGA at 9619 |
| | SEQ ID NO:34 | 3186 aa MW at 344940.7 kD |
| NOV14a, | MQKARGTRGEDAGTRAPPSPGVPPKRAKVGAGGGAPVAVAGAPVFLRPLKNAAVCAGS | |
| CG124136-01 | DVRLRVVVSGTPHPILRWFRDGQLLPARAPEPSCLWLRRCGAQDAGVYSCMAQNERGR | |
| Protein | ASCEAVLTVLEVGDSETAEDDISDVQGTQRLELRDDGAFSTPTGGSDTLVGTSLDTPP | |
| Sequence | TSVTGTSEEQVSWWGSGQTVLEQEAGSGGGTPRLPGSPRQAQATGAGPRHLGVEPLVR | |
| | ASRANLVGASWGSEDSLSVASDLYGSAFSLYRGRALSIHVSVPQSGLRREEPDLQPQL | |
| | ASEAPRRPAQPPPSKSALLPPPSPRVGKRSPPGPPAQPAATPTSPHRRTQEPVLPEDT | |
| | TTEEKRGKKSKSSGPSLAGTAESRPQTPLSEASGRLSALGRSPRLVRAGSRILDKLQF | |
| | FEERRRSLERSDSPPAPLRPWVPLRKARSLEQPKSERGAPWGTPGASQEELRAPGSVA | |
| | ERRRLFQQKAASLDERTRQRSPASDLELRFAQELGRIRRSTSREELVRSHESLRATLQ | |
| | RAPSPREPGEPPLFSRPSTPKTSRAVSPAAAQPPSPSSAEKPGDEPGRPRSRGPAGRT | |
| | EPGFGPQQEVRRRDQFPLTPSRAIQECRSPVPPPAADRPEARTKAPPGRKREPPAQAV | |
| | RFLPWATPGLEGAAVPQTLEKNRAGPEAEKRLRRGPEEDGPWGPWDRRGARSQGKGRR | |
| | ARPTSPELESSDDSYVSAGEEPLEAPVFEIPLQNVVVAPGADVLLKCIITANPPPQVS | |
| | WHKDGSALRSEGRLLLRAEGERHTLLLREARAADAGSYMATATNELGQATCAASLTVR | |
| | PGGSTSPFSSPITSDEEYLSPPEEFPEPGETWPRTPTMKPSRSQNRRSSDTGSAAPPT | |
| | FKVSLMDQSVREGQDVIMSIRVQGEPKPVVSWLRNRQPVRPDQRRFAEEAEGGLCRLR | |
| | ILAAERGDAGFYTCKAVNEYGARQCEARLRSEDVDVGAGEMALFECLVAGPTDVEVDW | |
| | LCRGRLLQPALLKCKMHFDGRKCKLLLTSVHEDDSGVYTCKLSTAKDELTCSARLTVR | |
| | PSLAPLFTRLLEDVEVLEGRAARFDCKISGTPPPVVTWTHFGCPMEESENLRLRQDGG | |
| | LHSLHIAHVGSEDEGLYAVSAVNTHGQAHCSAQLYVEEPRTAASGPSSKLEKMPSIPE | |
| | EPEQGELERLSIPDFLRPLQDLEVGLAKEAMLECQVTGLPYPTTSWPHNGHRIQSSDD | |
| | RRMTQYRDVHRLVFPAVGPQHAGVYKSVIANKLGKAACYAHLYVTDVVPGPPDGAPQV | |
| | VAVTGRMVTLTWNPPPSLDMAIDPDSLTYTVQHQVLGSDQWTALVTGLREPGWAATGL | |
| | RKGVQHIPRVLSTTVKSSSKPSPPSEPVQLLEHGPTLEFAPAMLDKPDIVYVVEGQPA | |
| | SVTVTFNHVFAQVVWRSCRGALLEARAGVYELSQPDDDQYCLRICRVSRRDMGALTCT | |
| | ARNRHGTQTCSVTLELAEAPRFESIMEDVEVGAGETARFAVVVEGKPLPDIMWYKDEV | |
| | LLTESSHVSFVYEENECSLVVLSTGAQDGGVYTCTAQNLAGEVSCAAELAVHSAQTAM | |
| | EVEGVGEDEDHRGRRLSDFYDIHQEIGRGAFSYLRRIVERSSGLEFAAKFIPSQAKPK | |
| | ASARREARLLARLQHDCVLYFHEAFERRRGLVIVTELCTEELLERIARKPTVCESEIR | |
| | AYMRQVLEGIHYLHQSHVLHLDVKPENLLVWDGAAGEQQVRICDFGNAQELTPGEPQY | |
| | CQYGTPEFVAPEIVNQSPVSGVTDIWPVGVVAFLLSDRNLPVCWGNDRTTLMNIRNYN | |
| | VAFEETTFLSLSREARGFLIKVLVQDRLRPTAEETLEHPWFKTQAKGAEVSTDHLKLF | |
| | LSRRRWQRSQISYKCHLVLRPIPELLRAPPERVWVTMPRRPPPSGGLSSSSDSEEEEL | |
| | EELPSVPRPLQPEFSGSRVSLTDIPTEDEALGTPETGAATPMDWQEQGRAPSQDQEAP | |
| | SPEALPSPGQEPAAGASPRRGELRRGSSAESALPRAGPRELGRGLHKAASVELPQRRS | |
| | PGPGATRLARGGLGEGEYAQRLQALRQRLLRGGPEDGKVSGLRGPLLESLGGRARDPR | |
| | MARAASSEAAPHHQPPLENRGLQKSSSFSQGEAEPRGRHRRAGAPLETPVARLGARRL | |
| | QESPSLSALSEAQPSSPARPSAPKPSTPKSAEPSATTPSDAPQPPAPQPAQDKAPEPR | |
| | PEPVRASKPAPPPQALQTLALPLTPYAQIIQSLQLSGHAQGPSQGPAAPPSEPKPHAA | |
| | VFARVASPPPGAPEKRVPSAGGPPVLAEKARVPTVPPRPGSSLSSSIENLESEAVFEA | |
| | KFKRSRESPLSLGLRLLSRSRSEERGPFRGAEEEDGIYRPSPAGTPLELVRRPERSRS | |
| | VQDLRAVGEPGLVRRLSLSLSQRLRRTPPAQRHPAWEARGGDGESSEGGSSARGSPVL | |
| | AMRRRLSFTLERLSSRLQRSGSSEDSGGASGRSTPLFGRLRRATSEGESLRRLGLPHN | |
| | QLAAQAGATTPSAESLGSEASATSGSSAPGESRSRLRWGFSRPRKDKGLSPPNLSASV | |
| | QEELGHQYVRSESDFPPVFHIKLKDQVLLEGEAATLLCLPAACPAPHISWMKDKKSLR | |
| | SEPSVITVSCKDGRQLLSIPRAGKRHAGLYECSATNVLGSITSSCTVAVARVPGKLAP | |
| | PEVPQTYQDTALVLWKPGDSRAPCTYTLERRVDGESVWHPVSSGIPDCYYNVTHLPVG | |
| | VTVRFRVACANRAGQGPFSNSSEKVFVRGTQDSSAVPSAAHQEAPVTSRSVRARPPDS | |
| | PTSLASPLAPAAPTPPSVTVSPSSPPTPPSQALSSLKAVGPPPQTPPRRHRGLQAARP | |
| | AEPTLPSTHVTPSEPQPFVLDTGTPIPASTPQGVKPVSSSTPVYVVTSFVSAPPAPEP | |
| | PAPEPPPEPTKVTVQSLSPAKEVVSSPGSSPRSSPRPEGTTLRQGPRQKPYTFLEEKA | |
| | RGRFGVVRACRENATGRTFVAKTVPYAAEGKPRVLQEYEVLRTLHHERTVSLHEAYIT | |
| | PRYLVLIAESCGNRELLCGLSDRFRYSEDDVATYMVQLLQGLDYLHGHHVLHLDIKPD | |
| | NLLLAPDNALKIVDFGSAQPYNPQALRPLGHRTVHLTLMSFWVWVLASGLHMSIKLSS | |
| | PTGSVDAPRSMSQTPRKRRLGLWGAALMPSSCTPIHPRAPPSSCERFSLYIPGE | |
| | SEQ ID NO:35 | 10122 bp |
| NOV14b, | CCGCGGGTGCCCCCGTGGCCGCCCAGTTCCGGCGTCCCCCCAGCCCAGCTCTCAGTGG | |
| CG124136-02 | CCATGCAGAAAGCCCGGGGCACGCGAGGCGAGGATGCGGGCACGAGGGCACCCCCCAG | |
| DNA | CCCCGGAGTGCCCCCGAAAAGGGCCAAGGTGGGGGCCGGCGGCGGGGCTCCTGTGGCC | |
| Sequence | GTGGCCGGGGCGCCAGTCTTCCTGCGGCCCCTGAAGAACGCGGCGGTGTGCGCGGGCA | |
| | GCGACGTGCGGCTGCGGGTGGTGGTGAGCGGGACGCCCCATCCCATCCTCCGCTGGTT | |
| | CCGGGATGGGCAGCTCCTGCCCGCGCCGGCCCCCGAGCCCAGCTGCCTGTGGCTGCGG | |
| | CGCTGCGGGGCGCAGGACGCCGGCGTGTACAGCTGCATGGCCCAGAACGAGCGGGGCC | |
| | GGGCCTCCTGCGAGGCGGTGCTCACAGTGCTGGAGGTCGGAGACTCAGAGACGGCTGA | |
| | GGATGACATCAGCGATGTGCAGGGAACCCAGCGCCTGGAGCTTCGGGATGACGGGGCC | |
| | TTCAGCACCCCCACGGGGGGTTCTGACACCCTGGTGGGCACCTCCCTGGACACACCCC | |
| | CGACCTCCGTGACAGGCACCTCAGAGGAGCAAGTGAGCTGGTGGGGCAGCGGGCAGAC | |
| | GGTCCTGGAGCAGGAAGCGGGCAGTGGGGGTGGCACCCGCCGCCTCCCGGGCAGCCCA | |
| | AGGCAAGCACAGGCAACCGGGGCCGGGCCACGGCACCTGGGGGTGGAGCCGCTGGTGC | |
| | GGGCATCTCGAGCTAATCTGGTGGGCGCAAGCTGGGGGTCAGAGGATAGCCTTTCCGT | |
| | GGCCAGTGACCTGTACGGCAGCGCATTCAGCCTGTACAGAGGACGGGCGCTCTCTATC | |
| | CACGTCAGCGTCCCTCAGAGCGGGTTGCGCAGGGAGGAGCCCGACCTTCAGCCTCAAC | |
| | TGGCCAGCGAAGCCCCACGCCGCCCTGCCCAGCCGCCTCCTTCCAAATCCGCGCTGCT | |
| | CCCCCCACCGTCCCCTCGGGTCGGGAAGCGGTCCCCGCCGGGACCCCCGGCCCAGCCC | |
| | GCGGCCACCCCCACGTCGCCCCACCGTCGCACTCAGGAGCCTGTGCTGCCCGAGGACA | |
| | CCACCACCGAAGAGAAGCGAGGGAAGAAGTCCAAGTCGTCCGGGCCCTCCCTGCCGGG | |
| | CACCGCGGAATCCCGACCCCAGACGCCACTGAGCGAGGCCTCAGGCCGCCTGTCGGCG | |
| | TTGGGCCGATCGCCTAGGCTGGTGCGCGCCGGCTCCCGCATCCTGGACAAGCTGCAGT | |
| | TCTTCGAGGAGCGACGGCGCAGCCTGGAGCGCAGCGACTCGCCGCCGGCGCCCCTGCG | |
| | GCCCTCGGTGCCCCTGCGCAAGGCCCGCTCTCTGGAGCAGCCCAAGTCGGAGCGCGGC | |
| | GCACCGTGGGGCACCCCCGGGGCCTCGCAGGAAGAACTGCGGGCGCCAGGCAGCGTGG | |
| | CCGAGCGGCGCCGCCTGTTCCAGCAGAAAGCGGCCTCGCTGGACGAGCGCACGCGTCA | |
| | GCGCAGCCCGGCCTCAGACCTCGAGCTGCGCTTCGCCCAGGAGCTGGGCCGCATCCGC | |
| | CGCTCCACGTCGCGGGAGGAGCTGGTGCGCTCGCACGAGTCCCTGCGCGCCACGCTGC | |
| | AGCGTGCCCCATCCCCTCGAGAGCCCGGCGAGCCCCCGCTCTTCTCTCGGCCCTCCAC | |
| | CCCCAAGACATCGCGGGCCGTGAGCCCCGCCGCCGCCCAGCCGCCCTCTCCGAGCAGC | |
| | GCGGAGAAGCCGGGGGACGAGCCTGGGAGGCCCAGGAGCCGCGGGCCGGCGGGCAGGA | |
| | CAGAGCCGGGGGAAGGCCCGCAGCAGGAGGTTAGGCGTCGGGACCAATTCCCGCTGAC | |
| | CCGGAGCAGAGCCATCCAGGAGTGCAGGAGCCCTGTGCCGCCCCCCGCCGCCGATCCC | |
| | CCAGAGGCCAGGACGAAAGCACCCCCCGGTCGGAAGCGGGAGCCCCCGGCGCAGGCCG | |
| | TGCGCTTCCTGCCCTGGGCCACGCCGGGCCTGGAGGGCGCTGCTGTACCCCAGACCTT | |
| | GGAGAAGAACAGGGCGGGGCCTGAGGCAGAGAAGAGGCTTCGCAGAGGGCCGGAGGAG | |
| | GACGGTCCCTGGGGGCCCTGGGACCGCCGAGGGGCCCGCAGCCAGGGCAAAGGTCGCC | |
| | GGGCCCGGCCCACCTCCCCTGAGCTCGAGTCTTCGGATGACTCCTACGTGTCCGCTGG | |
| | AGAAGAGCCCCTAGAGGCCCCTGTGTTTGAGATCCCCCTGCAGAATGTGGTGGTGGCA | |
| | CCAGGGGCAGATGTGCTGCTCAAGTGTATCATCACTGCCAACCCCCCGCCCCAAGTGT | |
| | CCTGGCACAAGGATGGGTCAGCGCTGCGCAGCGAGGGCCGCCTCCTCCTCCGGGCTGA | |
| | GGGTGAGCGGCACACCCTGCTGCTCAGGGAGGCCAGGGCAGCAGATGCCGGGAGCTAT | |
| | ATGGCCACCGCCACCAACGAGCTGGGCCAGGCCACCTGTGCCGCCTCACTGACCGTGA | |
| | GACCCGGTGGGTCTACATCCCCTTTCAGCAGCCCCATCACCTCCGACGAGGAATACCT | |
| | GAGCCCCCCAGAGGAGTTCCCAGAGCCTGGGGAGACCTGGCCGCGAACCCCCACCATG | |
| | AAGCCCAGTCCCAGCCAGAACCGCCGTTCTTCTGACACTGGCTCCAAGGCACCCCCCA | |
| | CCTTCAAGGTCTCACTTATGGACCAGTCAGTAAGAGAAGGCGAAGATGTCATCATGAG | |
| | CATCCGCGTGCAGGGGGAGCCCAAGCCTGTGGTCTCCTGGCTGAGAAACCGCCAGCCC | |
| | GTGCGCCCAGACCAGCGGCGCTTTGCGGAGGAGGCTGAGGGTGGGCTGTGCCGGCTGC | |
| | GGATCCTGGCTGCAGAGCGTGGCGATGCTGGTTTCTACACTTGCAAAGCGGTCAATGA | |
| | GTATGGTGCTCGGCAGTGCGAGGCCCGCTTGAGGTCCGAGGACGTGGACGTGGGGGCC | |
| | GGGGAGATGGCGCTGTTTGAGTGCCTGGTGGCGGGGCCCACTGACGTGGAGGTGGATT | |
| | GGCTGTGCCGTGGCCGCCTGCTGCAGCCTGCACTGCTCAAATGCAAGATGCATTTCGA | |
| | TGGCCGCAAATGCAAGCTGCTACTTACATCTGTACATGAGGACGACAGTGGCGTCTAC | |
| | ACCTGCAAGCTCAGCACGGCCAAAGATGAGCTGACCTGCAGTGCCCGGCTGACCGTGC | |
| | GGCCCTCGTTGGCACCCCTGTTCACACGGCTGCTGGAAGATGTGGAGGTGTTGGAGGG | |
| | CCGAGCTGCCCGTTTCGACTGCAAGATCAGTGGCACCCCGCCCCCTGTTGTTACCTGG | |
| | ACTCATTTTGGCTGCCCCATGGAGGAGAGTGAGAACTTGCGGCTGCGGCAGGACGGGG | |
| | GTCTGCACTCACTGCACATTGCCCATGTGGGCAGCGAGGACGAGGGGCTCTATGCGGT | |
| | CAGTGCTGTTAACACCCATGGCCAGGCCCACTGCTCAGCCCAGCTGTATGTAGAAGAG | |
| | CCCCGGACAGCCGCCTCAGGCCCCAGCTCGAAGCTGGAGAAGATGCCATCCATTCCCG | |
| | AGGAGCCAGAGCAGGGTGAGCTGGAGCGGCTGTCCATTCCTGACTTCCTGCGGCCACT | |
| | GCAGGACCTGGAGGTGGGACTGGCCAAGGAGGCCATGCTAGAGTGCCAGGTGACCGGC | |
| | CTGCCCTACCCCACCATCAGCTGGTTCCACAATGGCCACCGCATCCAGAGCAGCGACG | |
| | ACCGGCGCATGACACAGTACAGGGATGTCCATCGCTTGGTGTTCCCTGCCGTGGGGCC | |
| | TCAGCACGCCGGTGTCTACAAGAGCGTCATTGCCAACAAGCTGGGCAAAAGCTGCCTGC | |
| | TATGCCCACCTGTATGTCACAGATGTGGTCCCAGGCCCTCCAGATGGCGCCCCGCAGG | |
| | TGGTGGCTGTGACGGGGAGGATGGTCACACTCACATGGAACCCCCCCAGGAGTCTGGA | |
| | CATGGCCATCGACCCGGACTCCCTGACGTACACAGTGCAGCACCAGGTGCTGGGCTCG | |
| | GACCAGTGGACGGCACTGGTCACAGGCCTGCGGGAGCCAGGGTGGGCAGCCACAGGGC | |
| | TGCGTAAGGGGGTCCAGCACATCTTCCGGGTCCTCAGCACCACTGTCAAGAGCAGCAG | |
| | CAAGCCCTCACCCCCTTCTGAGCCTGTGCAGCTGCTGGAGCACGGCCCAACCCTGGAG | |
| | GAGGCCCCTGCCATGCTGGACAAACCAGACATCGTGTATGTGGTGGAGGGACAGCCTG | |
| | CCAGCGTCACCGTCACATTCAACCATGTGGAGGCCCAGGTCGTCTGGAGGAGCTGCCG | |
| | AGGGGCCCTCCTAGAGGCACGGGCCGGTGTGTACGAGCTGAGCCAGCCAGATGATGAC | |
| | CAGTACTGTCTTCGGATCTGCCGGGTGAGCCGCCGGGACATGGGGGCCCTCACCTGCA | |
| | CCGCCCGAAACCGTCACGGCACACAGACCTGCTCGGTCACATTGGAGCTGGCAGAGGC | |
| | CCCTCGGTTTGAGTCCATCATGGAGGACGTGGAGGTGGGGGCTGGGGAAACTGCTCGC | |
| | TTTGCGGTGGTGGTCGAGGGAAAACCACTGCCGGACATCATGTGGTACAAGGACGAGG | |
| | TGCTGCTGACCGAGAGCAGCCATGTGAGCTTCGTGTACGAGGAGAATGAGTGCTCCCT | |
| | GGTGGTGCTCAGCACGGGGGCCCAGGATGGAGGCGTCTACACCTGCACCGCCCAGAAC | |
| | CTGGCGGGTGAGGTCTCCTGCAAAGCAGAGTTGGCTGTGCATTCAGCTCAGACAGCTA | |
| | TGGAGGTCGAGGGGGTCGGGGAGGATGAGGACCATCGAGGAAGGAGACTCAGCGACTT | |
| | TTATGACATCCACCAGGAGATCGGCAGGGGTGCTTTCTCCTACTTGCGGCGCATAGTG | |
| | GAGCGTAGCTCCGGCCTGGAGTTTGCGGCCAAGTTCATCCCCAGCCAGGCCAAGCCAA | |
| | AGGCATCAGCGCGTCGGGAGGCCCGGCTGCTGGCCAGGCTCCAGCACGACTGTGTCCT | |
| | CTACTTCCATGAGGCCTTCGAGAGGCGCCGGGGACTGGTCATTGTCACCGAGCTCTGC | |
| | ACAGAGGAGCTGCTGGAGCGAATCGCCAGGAAACCCACCGTGTGTGAGTCTGAGATCC | |
| | GGGCCTATATGCGGCAGGTGCTAGAGGGAATACACTACCTGCACCAGAGCCACGTGCT | |
| | GCACCTCGATGTCAAGCCTGAGAACCTGCTGGTGTGGGATGGTGCTGCGGGCGAGCAG | |
| | CAGGTGCGGATCTGTGACTTTGGGAATGCCCAGGAGCTGACTCCAGGAGAGCCCCAGT | |
| | ACTGCCAGTATGGCACACCTGAGTTTGTAGCACCCGAGATTGTCAATCAGAGCCCCGT | |
| | GTCTGGAGTCACTGACATCTGGCCTGTGGGTCTTGTTGCCTTCCTGCTGTCTGACAGG | |
| | AATCTCCCCGTTTGTTGGGGAAATGACCGGACAACATTGATGAACATCCGAAACTACA | |
| | ACGTGGCCTTCGAGGAGACCACATTCCTGAGCCTGAGCAGGGAGGCCCGGGGCTTCCT | |
| | CATCAAAGTGTTGGTGCAGGACCGGCTGAGACCTACCGCAGAAGAGACCCTAGAACAT | |
| | CCTTGGTTCAAAACTCAGGCAAAGGGCGCAGAGGTGAGCACGGATCACCTGAAGCTAT | |
| | TCCTCTCCCGGCGGAGGTGGCAGCGCTCCCAGATCAGCTACAAATGCCACCTGGTGCT | |
| | GCGCCCCATCCCCGAGCTGCTGCGGGCCCCCCCAGAGCGGGTGTGGGTGACCATGCCC | |
| | AGAAGGCCACCCCCCAGTGGGGGGCTCTCATCCTCCTCGGATTCTGAAGAGGAAGAGC | |
| | TGGAAGAGCTGCCCTCAGTGCCCCGCCCACTGCAGCCCGAGTTCTCTGGCTCCCGGGT | |
| | GTCCCTCACAGACATTCCCACTGAGGATGAGGCCCTGGGGACCCCAGAGACTGGGGCT | |
| | GCCACCCCCATGGACTGGCAGGAGCAGGGAAGGGCTCCCTCTCAGGACCAGGAGGCTC | |
| | CCAGCCCAGAGGCCCTCCCCTCCCCAGGCCAGGAGCCCGCAGCTGGGGCTAGCCCCAG | |
| | GCGGGGAGAGCTCCGCAGGGGCAGCTCGGCTGAGAGCGCCCTGCCCCGGGCCGGGCCG | |
| | CGGGAGCTGGGCCGGGGCCTGCACAAGGCGGCGTCTGTGGAGCTGCCGCAGCGCCGGA | |
| | GCCCCGGCCCGGGAGCCACCCGCCTGGCCCGGGGAGGCCTGGGTGAGGGCGAGTATGC | |
| | CCAGAGGCTGCAGGCCCTGCGCCAGCGGCTGCTGCGGGGAGGCCCCGAGGATGGCAAG | |
| | GTCAGCGGCCTCAGGGGTCCCCTGCTGGAGAGCCTGGGGGGCCGTGCTCGGGACCCCC | |
| | GGATGGCACGAGCTGCCTCCAGCGAGGCAGCGCCCCACCACCAGCCCCCACTCGAGAA | |
| | CCGGGGCCTGCAAAAGAGCAGCAGCTTCTCCCAGGGTGAGGCGGAGCCCCGGGGCCGG | |
| | CACCGCCGAGCGGGGGCGCCCCTCGAGATCCCCGTGGCCAGGCTTGGGGCCCGTAGGC | |
| | TACAGGAGTCTCCTTCCCTGTCTGCCCTCAGCGAGGCCCAGCCATCCAGCCCTGCACG | |
| | GCCCAGCGCCCCCAAACCCAGTACCCCTAAGTCTGCAGAACCTTCTGCCACCACACCT | |
| | AGTGATGCTCCGCAGCCCCCCGCACCCCAGCCTGCCCAAGACAAGGCTCCAGAGCCCA | |
| | GGCCAGAACCAGTCCGAGCCTCCAAGCCTGCACCACCCCCCCAGGCCCTGCAAACCCT | |
| | AGCGCTGCCCCTCACACCCTATGCTCAGATCATTCAGTCCCTCCAGCTGTCAGGCCAC | |
| | GCCCAGGGCCCCTCGCAGGGCCCTGCCGCGCCGCCTTCAGAGCCCAAGCCCCACGCTG | |
| | CTGTCTTTGCCAGGGTGGCCTCCCCACCTCCGGGAGCCCCCGAGAAGCGCGTGCCCTC | |
| | AGCCGGGGGTCCCCCGGTGCTAGCCGAGAAAGCCCGAGTTCCCACGGTGCCCCCCAGG | |
| | CCAGGCAGCAGTCTCAGTAGCAGCATCGAAAACTTGGAGTCGGAGGCCGTGTTCGAGG | |
| | CCAAGTTCAAGCGCAGCCGCGAGTCGCCCCTGTCGCTGGGGCTGCGGCTGCTGAGCCG | |
| | TTCGCGCTCGGAGGAGCGCGGCCCCTTCCGTGGGGCCGAGGAGGAGGATGGCATATAC | |
| | CGGCCCAGCCCGGCGGGGACCCCGCTGGAGCTGGTGCGACGGCCTGAGCGCTCACGCT | |
| | CGGTGCACGACCTCAGGGCTGTCGGAGAGCCTGGCCTCGTCCGCCGCCTCTCGCTGTC | |
| | ACTGTCCCAGCGGCTGCGGCGGACCCCTCCCGCGCAGCGCCACCCGGCCTGGGAGGCC | |
| | CGCGGCGGGGACGGAGAGAGCTCGGAGGGCGGGAGCTCGGCGCGGGGCTCCCCGGTGC | |
| | TGGCGATGCGCAGGCGGCTGAGCTTCACCCTGGAGCGGCTGTCCAGCCGATTGCAGCG | |
| | CAGTGGCAGCAGCGAGGACTCGGGGGGCGCGTCGGGCCGCAGCACGCCGCTGTTCGGA | |
| | CGGCTTCGCAGGGCCACGTCCGAGGGCGAGAGTCTGCGGCGCCTTGGCCTTCCGCACA | |
| | ACCAGTTGGCCGCCCAGGCCGGCGCCACCACGCCTTCCGCCGAGTCCCTGGGCTCCGA | |
| | GGCCAGCGCCACGTCGGGCTCCTCAGCCCCAGGGGAAAGCCGAAGCCGGCTCCGCTGG | |
| | GGCTTCTCTCGGCCGCGGAAGGACAAGGGGTTATCGCCACCAAACCTCTCTGCCAGCG | |
| | TCCAGGAGGAGTTGGGTCACCAGTACGTGCGCAGTGAGTCAGACTTCCCCCCAGTCTT | |
| | CCACATCAAACTCAAGGACCAGGTGCTGCTGGAGGGGGAGGCAGCCACCCTGCTCTGC | |
| | CTGCCAGCGGCCTGCCCTGCACCGCACATCTCCTGGATGAAAGACAAGAAGTCCTTGA | |
| | GGTCAGAGCCCTCAGTGATCATCGTGTCCTGCAAAGATGGGCGGCAGCTGCTCAGCAT | |
| | CCCCCGGGCGGGCAAGCGGCACGCCGGTCTCTATGAGTGCTCGGCCACCAACGTACTG | |
| | GGCAGCATCACCAGCTCCTGTACCGTGGCTGTGGCCCGAGTCCCAGGAAAGCTAGCTC | |
| | CTCCAGAGGTACCCCAGACCTACCAGGACACGGCGCTGGTGCTGTGGAAGCCGGGAGA | |
| | CAGCCGGGCACCTTGCACGTATACGCTGGAGCGGCGAGTGGATGGGGAGTCTGTGTGG | |
| | CACCCTGTGAGCTCAGGCATCCCCGACTGTTACTACAACGTGACCCACCTGCCAGTTG | |
| | GCGTGACTGTGAGGTTCCGTGTGGCCTGTGCCAACCGTGCTGGGCAGGGGCCCTTCAG | |
| | CAACTCTTCTGAGAAGGTCTTTGTCAGGGGTACTCAAGATTCTTCAGCTGTGCCATCT | |
| | GCTGCCCACCAAGAGGCCCCTGTCACCTCAAGGTCAGTCAGGGCCCGGCCTCCTGACT | |
| | CTCCTACCTCACTGGCCTCACCCCTAGCTCCTGCTGCCCCCACACCCCCGTCAGTCAC | |
| | TGTCAGCCCCTCATCTCCCCCCACACCTCCTAGCCAGGCCTTGTCCTCGCTCAAGGCT | |
| | GTGGGTCCACCACCCCAAACCCCTCCACGAAGACACAGGGGCCTGCAGGCTGCCCGGC | |
| | CAGCGGAGCCCACCCTACCCAGTACCCACGTCACCCAAGTGAGCCCCAGCCTTTCGT | |
| | CCTTGACACTGGGACCCCGATCCCAGCCTCCACTCCTCAAGGGGTTAAACCAGTGTCT | |
| | TCCTCTACTCCTGTGTATGTGGTGACTTCCTTTGTGTCTGCACCACCAGCCCCTGAGC | |
| | CCCCAGCCCCTGAGCCCCCTCCTGAGCCTACCAAGGTGACTGTGCAGAGCCTCAGCCC | |
| | GGCCAAGGAGGTGGTCAGCTCCCCTGGGAGCAGTCCCCGAAGCTCTCCCAGGCCTGAG | |
| | GGTACCACTCTTCGACAGGGTCCCCCTCAGAAACCCTACACCTTCCTGGAGGAGAAAG | |
| | CCAGGGGCCGCTTTGGTGTTGTGCGAGCGTGCCGGGAGAATGCCACGGGGCGAACGTT | |
| | CGTGGCCAAGATCGTGCCCTATGCTGCCGAGGGCAAGCCGCGGGTCCTGCAGGAGTAC | |
| | GAGGTGATGCGGACCCTGCACCACGAGCGGATCATGTCCATGCACCAGGCCTACATCA | |
| | CCCCTCGGTACCTCGTGCTCATTGCTGAGAGCTGTGGCAACCGGGAACTCCTCTGTGG | |
| | GCTCAGTGACAGGTTCCGGTATTCTGAGGATGACGTGGCCACTTACATGGTGCAGCTG | |
| | CTACAAGGCCTGGACTACCTCCACGGCCACCACGTGCTCCACCTAGACATCAAGCCAG | |
| | ACAACCTGCTGCTGGCCCCTGACAATGCCCTCAAGATTGTGGACTTTGGCAGTGCCCA | |
| | GCCCTACAACCCCCAGGCCCTTAGGCCCCTTGGCCACCGCACGGGCACGCTGGAGTTC | |
| | ATGGCTCCGGAGATGGTGAAGGGAGAACCCATCGGCTCTGCCACGGACATCTGGGGAG | |
| | CGGGTGTGCTCACTTACATTATGCTCAGTGGACGCTCCCCGTTCTATGAGCCAGACCC | |
| | CCAGGAAACGGAGGCTCGGATTGTGGGGGGCCGCTTTGATGCCTTCCAGCTGTACCCC | |
| | AATACATCCCAGAGCGCCACCCTCTTCTTGCGAAAGGTTCTCTCTGTACATCCCTGGA | |
| | GCCGGCCCTCCCTGCAGGACTGCCTGGCCCACCCATGGTTGCAGGACGCCTACCTGAT | |
| | GAAGCTGCGCCGCCAGACGCTCACCTTCACCACCAACCGGCTCAAGGAGTTCCTGGGC | |
| | GAGCAGCGGCGGCGCCGGGCTGAGGCTGCCACCCGCCACAAGGTGCTGCTGCGCTCCT | |
| | ACCCTGGCGGCCCCTAGAGGCACGGACCACAGCCAGGCCTCGGGCTTCAAAACTGGGGTT | |
| | CCCACCAATGCCACGGGACATTCCAGGGCCCACGCTGAGCCAGGCGGGCCTGGGGCTT | |
| | CGGTTACCACCAGCAGCAACATCTGGCTGGGCTCTTACCTCATAGACCTTCAAGGACA | |
| | GAGACCCCAGGGCCTGGACCTGATGCCACCCCAGGCCAAAGCCAGAGTGGGAGACCCA | |
| | TTGGTCAGGCTCAGCAGGGTGGGAACAGGCAGAGGGACAAGAGGGGAATGGAGAAGTG | |
| | GAGAGGAAGGAATCGAGGGACAGGAAGG | |
| | ORF Start: ATG at 61 | ORF Stop: TAG at 9817 |
| | SEQ ID NO:36 | 3252 aa MW at 352828.6 kD |
| NOV14b, | MQKARGTRGEDAGTRAPPSPGVPPKRAKVGAGGGARVAVAGAPVFLRPLKNAAVCAGS | |
| CG124136-01 | DVRLRVVVSGTPHPILRWFRDGQLLPAPAPEPSCLWLRRCGAQDAGVYSCMAQNERGR | |
| Protein | ASCEAVLTVLEVGDSETAFDDISDVQGTQRLELRDDGAFSTPTGGSDTLVGTSLDTPP | |
| Sequence | TSVTGTSEEQVSWWGSGQTVLEQEAGSGGGTRRLRGSPRQAQATGAGPRHLGVEPLVR | |
| | ASRANLVGASWGSEDSLSVASDLYGSAFSLYRGRALSIHVSVPQSGLRREEPDLQPQL | |
| | ASEAPRRPAQPPPSKSALLPPPSPRVGKRSPPGPPAQPAATPTSPHRRTQEPVLREDT | |
| | TTEEKRGKKSKSSCPSLAGTASSRPQTPLSEASGRLSALORSPRLVRAGSRTLDKLQF | |
| | FEERRRSLERSDSPPAPLRPWVPLRKARSLEQPKSERGAPWGTPGASQEELRAPGSVA | |
| | ERRRLFQQKAASLDERTRQRSPASDLELRPAQSLGRIRRSTSREELVRSHESLRATLQ | |
| | RAPSPREPGEPPLFSRPSTPKTSRAVSPAAAQPPSPSSAEKPGDEPGRPRSRGPAGRT | |
| | EPGEGPQQEVRRRDQFPLTRSRAIQECRSPVPPPAADPPEARTKAPPGRKREPPAQAV | |
| | RFLPWATPGLEGAAVPQTLEKNRAGPSAEKRLRRGPEEDGPWGPWDRRGARSQGKGRR | |
| | ARPTSPELESSDDSYVSAGEEPLEAPVFSIPLQNVVVAPGADVLLKCIITAAPPPQVS | |
| | WHKDGSALRSEGRLLLRAFGERHTLLLREARAADAGSYMATATNELGQATCAASLTVR | |
| | PGGSTSPFSSPTTSDEEYLSPPEEFPEPGETWPRTPTMKPSPSQNRRSSDTGSKAPPT | |
| | FKVSLMDQSVREGQDVIMSIRVQGEPKPVVSWLRNRQPVRPDQRRFAEEAEGGLCRLR | |
| | IILAAERGDAGPYTCKAVNEYGARQCEARLRSEDVDVGAGEMALPECLVAGPTDVEVDW | |
| | LCRGRLLQPALLKCKMHFDGRKCKLLLTSVHEDDSGVYTCKLSTAKDELTCSARLTVR | |
| | PSLAPLFTRLLEDVEVLEGRAARFDCKISGTPPPVVTWTHFGCPMEESENLRLRQDGG | |
| | LHSLHTAHVGSEDEGLYAVSAVNTHGQAHCSAQLYVEEPRTAASGPSSKLEKMPSIPE | |
| | EPEQGELERLSIPDFLRPLQDLEVGLAKEAMLECQVTGLPYPTTSWFHNGHRTQSSDD | |
| | RRMTQYRDVHRLVFPAVGPQHAGVYKSVIANKLGKAACYAHLYVTDVVPGRPDGAPQV | |
| | VAVTGRMVTLTWNPPRSLDMAIDPDSLTYTVQHQVLGSDQWTALVTGLREPGAAATGL | |
| | RKGVQHIFRVLSTTVKSSSKPSPPSEPVQLLEHGPTLEEAPAMLDKPDIVYVVEGQPA | |
| | SVTVTFNHVEAQVVWRSCRGALLEARAGVYELSQRDDDQYCLRICRVSRRDMGALTCT | |
| | ARNRHGTQTCSVTLELAEAPRFESTMEDVEVGAGETARFAVVVEGKPLPDIMWYKDEV | |
| | LLTESSHVSFVYEENECSLVVLSTGAQDGGVYTCTAQNLAGEVSCAAELAVHSAQTAA | |
| | EVEGVGEDEDHRGRRLSDFYDTHQEIGRGAFSYLRRIVERSSGLEPAAKFIPSQAKPK | |
| | ASARREARLLARLQHDCVLYFHEAFERRRGLVIVTELCTEELLERIARKPTVCESETR | |
| | KYMRQVLEGIHYLHQSHVLHLDVKPENLLVWDGAAGEQQVRICDFGNAQELTPGEPQY | |
| | CQYGTPEFVAPEIVNQSPVSGVTDIWPVGVVAFLLSDRNLPVCWGNDRTTLMNIRNYN | |
| | VAFEETTFLSLSREARGPLIKVLVQDRLRPTAEETLEHPWFKTQAKGAEVSTDHLKLF | |
| | LSRRRWQRSQISYKCHLVLRPIPELLRARPERVWVTMPRRPPPSGGLSSSSDSEEEEL | |
| | EELPSVPRPLQPEFSGSRVSLTDIPTEDEALGTPETGAATPMDWQEQGRAPSQDQEAP | |
| | SPEALPSPGQEPAAGASPRRGELRRG8SAESALPRAGPRELGRGLHAAASVELPQRRS | |
| | PGPGATRLARGGLGEGEYAQRLQALRQRLLRGGPEDGKVSGLRGRLLESLGGRARDPR | |
| | MARAASSEAAPHHQPPLENRGLQKSSSFSQGEAEPRGRHRRAGAPLEIPVARLGARRL | |
| | QESPSLSALSEAQPSSPARPSAPKPSTPKSAEPSATTPSDAPQPRARQPAQDAAPEPR | |
| | PEPVRASKPAPPPQALQTLALRLTPYAQIIQSLQLSGHAQGPSQGPAAPPSEPKPHAA | |
| | VPARVASPPPGAPEKRVPSAGGPPVLAEKARVPTVPPRPGSSLSSSIENLESEAVFEA | |
| | KFKRSRESPLSLGLRLLSRSRSEERGPFRGAEEEDGIYRPSPAGTPLELVRRRERSRS | |
| | VQDLRAVGEPGLVRRLSLSLSQRLRRTPRAQRHPAWEARGGDGESSEGGSSARGSPVL | |
| | AMRRRLSFTLERLSSRLQRSGSSEDSGGASGRSTPLFGRLRRATSEGESLRRLGLPHN | |
| | QLAAQAGATTPSAESLGSEASATSGSSARGESRSRLRWGPSRPRKDKGLSPPNLSASV | |
| | QEELGHQYVRSESDFPPVFHIKLKDQVLLEGEAATLLCLRAACPAPHISWMKDKKSLR | |
| | SEPSVIIVSCKDGRQLLSIPRAGKRHAGLYECSATNVLGSITSSCTVAVARVPGKLAP | |
| | REVPQTYQDTALVLWKPGDSPAPCTYTLERRVDGESVWHPVSSGIRDCYYNVTHLPVG | |
| | VTVRFRVACANRAGQGPFSNSSEKVFVRGTQDSSAVPSAAHQEAPVTSRSVRARPPDS | |
| | PTSLASPLAPAAPTPPSVTVSPSSPPTPPSQALSSLKAVGPPPQTPPRRHRGLQAARP | |
| | AEPTLPSTHVTPSEPQPFVLDTGTPIPASTPQGVKPVSSSTPVYVVTSFVSAPPAPEP | |
| | PAREPPPEPTKVTVQSLSPAKEVVSSPGSSPRSSPRPEGTTLRQGPPQKPYTFLEFKA | |
| | RGRPGVVRACRENATGRTFVAKIVPYAAEGKPRVLQEYEVMRTLHHERTMSMHEAYIT | |
| | PRYLVLIAESCGNRELLCGLSDRFRYSEDDVATYMVQLLQGLDYLHGHHVLHLDIKPD | |
| | NLLLAPDNALKIVDFGSAQPYNPQALRPLGHRTGTLEFMAPEMVKGBPIGSATDIWGA | |
| | GVLTYIMLSGRSPFYEPDPQETEARIVGGRFDAFQLYPNTSQSATLFLRKVLSVHPWS | |
| | RPSLQDCLAHPWLQDAYLMKLRRQTLTFTTNRLKSFLGEQRRRRAEAATRHKVLLRSY | |
| | PGGP | |
| | SEQ ID NO:37 | 9698 bp |
| NOV14c, | CCGCGGGTGCCCCCGTGGCCGCCCAGTTCCGGCGTCCCCCCAGCCCAGCTCTCAGTGG | |
| CG124136-03 | CCATGCAGAAAGCCCGGGGCACGCGAGGCGAGGATGCGGGCACGAGGGCACCCCCCAG | |
| DNA | CCCCGGAGTGCCCCCGAAAAAGGGCCAAGGTGGGGGCCGGCGGCGGGGCTCCTGTGGCC | |
| Sequence | GTGGCCGGGGCGCCAGTCTTCCTGCGGCCCCTGAAGAACGCGGCGGTGTGCGCGGGCA | |
| | GCGACGTGCGGCTGCGGGTGGTGGTGAGCGGGACGCCCCAGCCCAGCCTCCGCTGGTT | |
| | CCGGGATGGGCAGCTCCTGCCCGCGCCGGCCCCCGAGCCCAGCTGCCTGTGGCTGCGG | |
| | CGCTGCGGGGCGCAGGACGCCGGCGTGTACAGCTGCATGGCCCAGAACGAGCGGGGCC | |
| | GGGCCTCCTGCGAGGCGGTGCTCACAGTGCTGGAGGTCGGAGACTCAGAGACGGCTGA | |
| | GGATGACATCAGCGATGTGCAGGGAACCCAGCGCCTGGAGCTTCGGGATGACGGGGCC | |
| | TTCAGCACCCCCACGGGGGGTTCTGACACCCTGGTGGGCACCTCCCTGGACACACCCC | |
| | CGACCTCCGTGACAGGCACCTCAGAGGAGCAAGTGAGCTGGTGGGGCAGCGGGCAGAC | |
| | AGCAGCGTCCCTCAGAGCGGGTTGCGCAGGGAGGAGCCCGACCTTCAGCCTCAACTGG | |
| | CCAGCGAAGCCCCACGCCGCCCTGCCCAGCCGCCTCCTTCCAAATCCGCGCTGCTCCC | |
| | CCCACCGTCCCCTCGGGTCGGGAAGCGGTCCCCGCCGGGACCCCCGGCCCAGCCCGCG | |
| | GCCACCCCCACGTCGCCCCACCGTCGCACTCAGGAGCCTGTGCTGCCCGAGGACACCA | |
| | CCACCGAAGAGAAGCGAGGGAAGAAGTCCAAGTCGTCCGGGCCCTCCCTGGCGGGCAC | |
| | CGCGGAATCCCGACCCCAGACGCCACTGAGCGAGGCCTCAGGCCGCCTGTCGGCGTTG | |
| | GGCCGATCGCCTAGGCTGGTGCGCGCCGGCTCCCGCATCCTGGACAAGCTGCAGTTCT | |
| | TCGAGGAGCGACGGCGCAGCCTGGAGCGCAGCGACTCGCCGCCGGCGCCCCTGCGGCC | |
| | CTGGGTGCCCCTGCGCAAGGCCCGCTCTCTGGAGCAGCCCAAGTCGGAGCGCGGCGCA | |
| | CCGTGGGGCACCCCCGGGGCCTCGCAGGAAGAACTGCGGGCGCCAGGCAGCGTGGCCG | |
| | AGCGGCGCCGCCTGTTCCAGCAGAAAGCGGCCTCGCTGGACGAGCGCACGCGTCAGCG | |
| | CAGCCCGGCCTCAGACCTCGAGCTGCGCTTCGCCCAGGAGCTGGGCCGCATCCGCCGC | |
| | TCCACGTCGCGGGAGGAGCTGGTGCGCTCGCACGAGTCCCTGCGCGCCACGCTGCAGC | |
| | GTGCCCCATCCCCTCGAGAGCCCGGCGAGCCCCCGCTCTTCTCTCGGCCCTCCACCCC | |
| | CAAGACATCGCGGGCCGTGAGCCCCGCCGCCGCCCAGCCGCCCTCTCCGAGCAGCGCG | |
| | GAGAAGCCGGGGGACGAGCCTGGGAGGCCCAGGAGCCGCGGGCCGGCGGGCAGGACAG | |
| | AGCCGGGGGAAGGCCCGCAGCAGGAGGTTAGGCGTCGGGACCAATTCCCGCTGACCCG | |
| | GAGCAGAGCCATCCAGGAGTGCAGGAGCCCTGTGCCGCCCCCCGCCGCCGATCCCCCA | |
| | GAGGCCAGGACGAAAGCACCCCCCGGTCGGAAGCGGGAGCCCCCGGCGCAGGCCGTGC | |
| | GCTTCCTGCCCTGGGCCACGCCGGGCCTGGAGGGCGCTGCTGTACCCCAGACCTTGGA | |
| | GAAGAACAGGGCGGGGCCTGAGGCAGAGAAGAGGCTTCGCAGAGGGCCGGAGGAGGAC | |
| | GGTCCCTGGGGGCCCTGGGACCGCCGAGGGGCCCGCAGCCAGGGCAAAGGTCGCCGGG | |
| | CCCGGCCCACCTCCCCTGAGCTCGAGTCTTCGGATGACTCCTACGTGTCCGCTGGAGA | |
| | AGAGCCCCTAGAGGCCCCTGTGTTTGAGATCCCCCTGCAGAATGTGGTGGTGGCACCA | |
| | GGGGCAGATGTGCTGCTCAAGTGTATCATCACTGCCAACCCCCCGCCCCAAGTGTCCT | |
| | GGCACAAGGATGGGTCAGCGCTGCGCAGCGAGGGCCGCCTCCTCCTCCGGGCTGAGGG | |
| | TGAGCGGCACACCCTGCTGCTCAGGGAGGCCAGGGCAGCAGATGCCGGGAGCTATATG | |
| | GCCACCGCCACCAACGAGCTGGGCCAGGCCACCTGTGCCGCCTCACTGACCGTGAGAC | |
| | CCGGTGGGTCTACATCCCCTTTCAGCAGCCCCATCACCTCCGACGAGGAATACCTGAG | |
| | CCCCCCAGAGGAGTTCCCAGAGCCTGGGGAGACCTGGCCGCGAACCCCCACCATGAAG | |
| | CCCAGTCCCAGCCAGAACCGCCGTTCTTCTGACACTGGCTCCAAGGCACCCCCCACCT | |
| | TCAAGGTCTCACTTATGGACCAGTCAGTAAGAGAAGGCCAAGATGTCATCATGAGCAT | |
| | CCGCGTGCAGGGGGAGCCCAAGCCTGTGGTCTCCTGGCTGAGAAACCGCCAGCCCGTG | |
| | CGCCCAGACCAGCGGCGCTTTGCGGAGGAGGCTGAGGGTGGGCTGTGCCGGCTGCGGA | |
| | TCCTGGCTGCAGAGCGTGGCGATGCTGGTTTCTACACTTGCAAAGCGGTCAATGAGTA | |
| | TGGTGCTCGGCAGTGCGAGGCCCGCTTGGAGGTCCGAGCACACCCTGAAAGCCGGTCC | |
| | CTGGCCGTGCTGGCCCCCCTGCAGGACGTGGACGTGGGGGCCGGGGAGATGGCGCTGT | |
| | TTGAGTGCCTGGTGGCGGGGCCCACTGACGTGGAGGTGGATTGGCTGTGCCGTGGCCG | |
| | CCTGCTGCAGCCTGCACTGCTCAATGCAAGATGCATTTCGATGGCCGCAAAAATGCAAG | |
| | CTGCTACTTACATCTGTACATGAGGACGACAGTGGCGTCTACACCTGCAAGCTCAGCA | |
| | CGGCCAAAGATGAGCTGACCTGCAGTGCCCGGCTGACCGTGCGGCCCTCGTTGGCACC | |
| | CCTGTTCACACGGCTGCTGGAAGATGTGGAGGTGTTGGAGGGCCGAGCTGCCCGTTTC | |
| | GACTGCAAGATCAGTGGCACCCCGCCCCCTGTTGTTACCTGGACTCATTTTGGCTGCC | |
| | CCATGGAGGAGAGTGAGAACTTGCGGCTGCGGCAGGACGGGGGTCTGCACTCACTGCA | |
| | CATTGCCCATGTGGGCAGCGAGGACGAGGGGCTCTATGCGGTCAGTGCTGTTAACACC | |
| | CATGGCCAGGCCCACTGCTCAGCCCAGCTGTATGTAGAAGAGCCCCGGACAGCCGCCT | |
| | CAGGCCCCAGCTCGAAGCTGGAGAAGATGCCATCCATTCCCGAGGAGCCAGAGCAGGG | |
| | TGAGCTGGAGCGGCTGTCCATTCCCGACTTCCTGCGGCCACTGCAGGACCTGGAGGTG | |
| | GGACTGGCCAAGGAGGCCATGCTAGAGTGCCAGGTGACCGGCCTGCCCTACCCCACCA | |
| | TCAGCTGGTTCCACAATGGCCACCGCATCCAGAGCAGCGACGACCGGCGCATGACACA | |
| | TACAAGAGCGTCATTGCCAACAAGCTGGGCAAAGCTGCCTGCTATGCCCACCTGTATG | |
| | TCACAGATGTGGTCCCAGGCCCTCCAGATGGCGCCCCGCAGGTGGTGGCTGTGACGGG | |
| | GAGGATGGTCACACTCACATGGAACCCCCCCAGGAGTCTGGACATGGCCATCGACCCG | |
| | GACTCCCTGACGTACACAGTGCAGCACCAGGTGCTGGGCTCGGACCAGTGGACGGCAC | |
| | TGGTCACAGGCCTGCGGGAGCCAGGGTGGGCAGCCACAGGGCTGCGTAAGGGGGTCCA | |
| | GCACATCTTCCGGGTCCTCAGCACCACTGTCAAGAGCAGCAGCAAGCCCTCACCCCCT | |
| | TCTGAGCCTGTGCAGCTGCTGGAGCACGGCCCAACCCTGGAGGAGGCCCCTGCCATGC | |
| | TGGACAAACCAGACATCGTGTATGTGGTGGAGGGACAGCCTGCCAGCGTCACCGTCAC | |
| | ATTCAACCATGTGGAGGCCCAGGTCGTCTGGAGGAGCTGCCGAGGGGCCCTCCTAGAG | |
| | GCACGGGCCGGTGTGTACGAGCTGAGCCAGCCAGATGATGACCAGTACTGTCTTCGGA | |
| | TCTGCCGGGTGAGCCGCCGGGACATGGGGGCCCTCACCTGCACCGCCCGAAACCGTCA | |
| | CGGCACACAGACCTGCTCGGTCACATTGGAGCTGGCAGAGGCCCCTCGGTTTGAGTCC | |
| | ATCATGGAGGACGTGGAGGTGGGGGCTGGGGAAACTGCTCGCTTTGCGGTGGTGGTCG | |
| | AGGGAAAACCACTGCCGGACATCATGTGGTACAAGGACGAGGTGCTGCTGACCGAGAG | |
| | CAGCCATGTGAGCTTCGTGTACGAGGAGAATGAGTGCTCCCTGGTGGTGCTCAGCACG | |
| | GGGGCCCAGGATGGAGGCGTCTACACCTGCACCGCCCAGAACCTGGCGGGTGAGGTCT | |
| | CCTGCAAAGCAGAGTTGGCTGTGCATTCAGCTCAGACAGCTATGGAGGTCGAGGGGGT | |
| | CGGGGAGGATGAGGACCATCGAGGAAGGAGACTCAGCGACTTTTATGACATCCACCAG | |
| | GAGATCGGCAGGGGTGCTTTCTCCTACTTGCGGCGCATAGTGGAGCGTAGCTCCGGCC | |
| | TGGAGTTTGCGGCCAAGTTCATCCCCAGCCAGGCCAAGCCAAAGGCATCAGCGCGTCG | |
| | GGAGGCCCGGCTGCTGGCCAGGCTCCAGCACGACTGTGTCCTCTACTTCCATGAGGCC | |
| | TTCGAGAGGCGCCGGGGACTGGTCATTGTCACCGAGCTCTGCACAGAGGAGCTGCTGG | |
| | AGCGAATCGCCAGGAAACCCACCGTGTGTGAGTCTGAGATCCGGGCCTATATGCGGCA | |
| | GGTGCTAGAGGGAATACACTACCTGCACCAGAGCCACGTGCTGCACCTCGATGTCAAG | |
| | CCTGAGAACCTGCTGGTGTGGGATGGTGCTGCGGGCGAGCAGCAGGTGCGGATCTGTG | |
| | ACTTTGGGAATGCCCAGGAGCTGACTCCAGGAGAGCCCCAGTACTGCCAGTATGGCAC | |
| | ACCTGAGTTTGTAGCACCCGAGATTGTCAATCAGAGCCCCGTGTCTGGAGTCACTGAC | |
| | ATCTGGCCTGTGGGTGTTGTTGCCTTCCTCTGTCTGACAGGAATCTCCCCGTTTGTTG | |
| | GGGAAAAATGACCGGACAACATTGATGAACATCCGAACTACAACGTGGCCTTCGAGGA | |
| | GACCACATTCCTGAGCCTGAGCAGGGAGGCCCGGGGCTTCCTCATCAAAGTGTTGGTG | |
| | CAGGACCGGCTGAGACCTACCGCAGAAGAGACCCTAGAACATCCTTGGTTCAAAACTC | |
| | AGGCAAAGGGCGCAGAGGTGAGCACGGATCACCTGAAGCTATTCCTCTCCCGGCGGAG | |
| | GTGGCAGCGCTCCCAGATCAGCTACAAATGCCACCTGGTGCTGCGCCCCATCCCCGAG | |
| | CTGCTGCGGGCCCCCCCAGAGCGGGTGTGGGTGACCATGCCCAGAAGGCCACCCCCCA | |
| | GTGGGGGGCTCTCATCCTCCTCGGATTCTGAAGAGGAAGAGCTGGAAGAGCTGCCCTC | |
| | AGTGCCCCGCCCACTGCAGCCCGAGTTCTCTGGCTCCCGGGTGTCCCTCACAGACATT | |
| | CCCACTGAGGATGAGGCCCTGGGGACCCCAGAGACTGGGGCTGCCACCCCCATGGACT | |
| | GGCAGGAGCAGGGAAGGGCTCCCTCTCAGGACCAGGAGCCTCCCAGCCCAGAGGCCCT | |
| | CCCCTCCCCAGGCCAGGAGCCCGCAGCTGGGGCTAGCCCCAGGCGGGGAGAGCTCCGC | |
| | ACGGGCAGCTCGGCTGAGAGCGCCCTGCCCCGGGCCGGGCCGCGGGAGCTGGGCCGGG | |
| | GCCTGCACAAGGCGGCGTCTGTGGAGCTGCCGCAGCGCCGGAGCCCCGGCCCGGGAGC | |
| | CACCCGCCTGGCCCGGGCAGGCCTGGGTGAGGGCGAGTATGCCCAGAGGCTGCAGGCC | |
| | CTGCGCCAGCGGCTGCTGCGGGGAGGCCCCGAGGATGGCAAGGTCAGCGGCCTCAGGG | |
| | GTCCCCTGCTGGAGAGCCTGGGGGGCCGTGCTCGGGACCCCCGGATGGCACGAGCTGC | |
| | CTCCAGCGAGGCAGCGCCCCACCACCAGCCCCCACTCGAGAACCGGGGCCTGCAAAAG | |
| | AGCAGCAGCTTCTCCCAGGGTGAGGCGGAGCCCCGGGGCCGGCACCGCCGAGCGGGGG | |
| | CGCCCCTCGAGATCCCCGTGGCCAGGCTTGGGGCCCGTAGGCTACAGGAGTCTCCTTC | |
| | CCTGTCTGCCCTCAGCGAGGCCCAGCCATCCAGCCCTGCACGGCCCAGCGCCCCCAAA | |
| | CCCAGTACCCCTAAGTCTGCAGAACCTTCTGCCACCACACCTAGTGATGCTCCGCAGC | |
| | CCCCCGCACCCCAGCCTGCCCAAGACAAGGCTCCAGAGCCCAGGCCAGAACCAGTCCG | |
| | AGCCTCCAAGCCTGCACCACCCCCCCAGGCCCTGCAAACCCTAGCGCTGCCCCTCACA | |
| | CCCTATGCTCAGATCATTCAGTCCCTCCAGCTGTCAGGCCACGCCCAGGGCCCCTCGC | |
| | AGGGCCCTGCCGCGCCGCCTTCAGAGCCCAAGCCCCACGCTGCTGTCTTTGCCAGGGT | |
| | GGCCTCCCCACCTCCGGGAGCCCCCGAGAAGCGCGTGCCCTCAGCCGGGGGTCCCCCG | |
| | GTGCTAGCCGAGAAAGCCCGAGTTCCCACGGTGCCCCCCAGGCCAGGCAGCAGTCTCA | |
| | GTAGCAGCATCGAAAACTTGGAGTCGGAGGCCGTGTTCGAGGCCAAGTTCAAGCGCAG | |
| | CCGCGAGTCGCCCCTGTCGCTGGGGCTGCGGCTGCTGAGCCGTTCGCGCTCGGAGGAG | |
| | CGCGGCCCCTTCCGTGGGGCCGAGGAGGAGGATGGCATATACCGGCCCAGCCCGGCGG | |
| | GGACCCCGCTGGAGCTGGTGCGACGGCCTGAGCGCTCACGCTCGGTGCAGGACCTCAG | |
| | GGCTGTCGGAGAGCCTGGCCTCGTCCGCCGCCTCTCGCTGTCACTGTCCCAGCGGCTG | |
| | CGGCGGACCCCTCCCGCGCAGCGCCACCCGGCCTGGGAGGCCCGCGGCGGGGACGGAG | |
| | AGAGCTCGGAGGGCGGGAGCTCGGCGCGGGGCTCCCCGGTGCTGGCGATGCGCAGGCG | |
| | GCTGAGCTTCACCCTGGAGCGGCTGTCCAGCCGATTGCAGCCCAGTGGCAGCAGCGAG | |
| | GACTCGGGGGGCGCGTCGGGCCGCAGCACGCCGCTGTTCGGACGGCTTCGCAGGGCCA | |
| | CGTCCGAGGGCGAGAGTCTGCGGCGCCTTGGCCTTCCGCACAACCAGTTGGCCGCCCA | |
| | GGCCGGCGCCACCACGCCTTCCGCCGAGTCCCTGGGCTCCGAGGCCAGCGCCACGTCG | |
| | GGCTCCTCAGCCCCAGGGGAAAGCCGAAGCCGGCTCCGCTGGGGCTTCTCTCGGCCGC | |
| | GGAAGGACAAGGGGTTATCGCCACCAAACCTCTCTGCCAGCGTCCAGGAGGAGTTGGG | |
| | TCACCAGTACGTGCGCAGTGAGTCAGACTTCCCCCCAGTCTTCCACATCAAACTCAAG | |
| | GACCAGGTGCTGCTGGAGGGGGAGGCAGCCACCCTGCTCTGCCTGCCAGCGGCCTGCC | |
| | CTGCACCGCACATCTCCTGGATGAAAGACAAGAAGTCCTTGAGGTCAGAGCCCTCAGT | |
| | GATCATCGTGTCCTGCAAAGATGGGCGGCAGCTGCTCAGCATCCCCCGGGCGGGCAAG | |
| | CGGCACGCCGGTCTCTATGAGTGCTCGGCCACCAACGTACTGGGCAGCATCACCAGCT | |
| | CCTGTACCGTGGCTGTGGCCCGAGTCCCAGGAAAGCTAGCTCCTCCAGAGGTACCCCA | |
| | GACCTACCAGGACACGGCGCTGGTGCTGTGGAAGCCGGGAGACAGCCGGGCACCTTGC | |
| | ACGTATACGCTGGAGCGGCGAGTGGATGGGGAGTCTGTGTGGCACCCTGTGAGCTCAG | |
| | GCATCCCCGACTGTTACTACAACGTGACCCACCTGCCAGTTGGCGTGACTGTGAGGTT | |
| | CCGTGTGGCCTGTGCCAACCGTGCTGGGCAGGGGCCCTTCAGCAACTCTTCTGAGAAG | |
| | GTCTTTGTCAGGGGTACTCAAGATTCTTCAGCTGTGCCATCTGCTGCCCACCAAGAGG | |
| | CCCCTGTCACCTCAAGGCCAGCCAGGGCCCGGCCTCCTGACTCTCCTACCTCACTGGC | |
| | CCCACCCCTAGCTCCTGCTGCCCCCACACCCCCGTCAGTCACTGTCAGCCCCTCATCT | |
| | CCCCCCACACCTCCTAGCCAGGCCTTGTCCTCGCTCAAGGCTGTGGGTCCACCACCCC | |
| | AAACCCCTCCACGAAGACACAGGGGCCTGCAGGCTGCCCGGCCAGCGGAGCCCACCCT | |
| | ACCCAGTACCCACGTCACCCCAAGTGAGCCCAAGCCTTTCGTCCTTGACACTGGGACC | |
| | CCGATCCCAGCCTCCACTCCTCAAGGGGTTAAACCAGTGTCTTCCTCTACTCCTGTGT | |
| | ATGTGGTGACTTCCTTTGTGTCTGCACCACCAGCCCCTGAGCCCCCAGCCCCTGAGCC | |
| | CCCTCCTGAGCCTACCAAGGTGACTGTGCAGAGCCTCAGCCCGGCCAAGGAGGTGGTC | |
| | AGCTCCCCTGGGAGCAGTCCCCGAAGCTCTCCCAGGCCTGAGGGTACCACTCTTCGAC | |
| | AGGGTCCCCCTCAGAAACCCTACACCTTCCTGGAGGAGAAAGCCAGGGGCCGCTTTGG | |
| | TGTTGTGCGAGCGTGCCGGGAGAATGCCACGGGGCGAACGTTCGTGGCCAAGATCGTG | |
| | CCCTATGCTGCCGAGGGCAAGCGGCGGGTCCTGCAGGAGTATGAGGTGCTGCGGACCC | |
| | TGCACCACGAGCGGATCATGTCCCTGCACGAGGCCTACATCACCCCTCGGTACCTCGT | |
| | GCTCATTGCTGAGAGCTGTGGCAACCGGGAACTCCTCTGTGGGCTCAGTGACAGGTTC | |
| | CGGTATTCTGAGGATGACGTGGCCACTTACATGGTGCAGCTGCTACAAGGCCTGGACT | |
| | ACCTCCACGGCCACCACGTGCTCCACCTAGACATCAAGCCAGACAACCTGCTGCTGGC | |
| | CCCTGACAATGCCCTCAAGATTGTGGACTTTGGCAGTGCCCAGCCCTACAACCCCCAG | |
| | GCCCTTAGGCCCCTTGGCCACCGCACGGGCACGCTGGAGTTCATGGCTCCGGAGATGG | |
| | TGAAGGGAGAACCCATCGGCTCTGCCACGGACATCTGGGGAGCGGGTGTGCTCACTTA | |
| | CATTATGCTCAGTGGACGCTCCCCGTTCTATGAGCCAGACCCCCAGGAAACGGAGGCT | |
| | CGGATTGTGGGGGGCCGCTTTGATGCCTTCCAGCTGTACCCCAATACATCCCAGAGCG | |
| | CCACCCTCTTCTTGCGAAAGGTTCTCTCTGTACATCCCTGGAGCCGGCCCTCCCTGCA | |
| | ACGCTCACCTTCACCACCAACCGGCTCAAGGAGTTCCTGGGCGAGCAGCGGCGGCGCC | |
| | GGGCTGAGGCTGCCACCCGCCACAAGGTGCTGCTGCGCTCCTACCCTGGCGGCCCCTA | |
| | GGCGGCCGCTAT | |
| | ORF Start: ATG at 61 | ORF Stop: TAG at 9685 |
| | SEQ ID NO:38 | 3208 aa MW at 348092.4 kD |
| NOV14c, | MQKARGTRGEDAGTRAPPSPGVPPKRAKVGAGGGAPVAVAGAPVFLRPLKNAAVCAGS | |
| CG124136-03 | IDVRLRVVVSGTPQPSLRWFRDGQLLPAPAPEPSCLWLRRCGAQDAGVYSCMAQNERGR | |
| Protein | AAASCEAVLTVLEVGDSETAEDDISDVQGTQRLELRDDGAFSTPTGGSDTLVGTSLDTPP | |
| Sequence | TSVTGTSEEQVSWWGSGQTVLEQEAGSGGGTRRLPGSPSSVPQSGLRREEPDLQPQLA | |
| | SEAPRRPAQPPPSKSALLPPPSPRVGKRSPPGPPAQPAATPTSPHRRTQEPVLPEDTT | |
| | TEEKRGKKSKSSGPSLAGTAESRPQTPLSEASGRLSALGRSPRLVRAGSRILDKLQFE | |
| | EERRRSLERSDSPPAPLRPWVPLRKARSLEQPKSERGAPWGTPGASQEELRAPGSVAE | |
| | RRRLFQQKAASLDERTRQRSPASDLELRFAQELGRIRRSTSREELVRSHESLRATLQR | |
| | APSPREPGEPPLFSRPSTPKTSRAVSPAAAQPPSPSSAEKPGDEPGRPRSRGPAGRTE | |
| | PGEGPQQEVRRRDQFPLTRSRAIQECRSPVPPPAADPPEARTKAPPGRKREPPAQAVR | |
| | FLPWATPGLEGAAVPQTLEKNRAGPEAEKRLRRGPEEDGPWGPWDRRGARSQGKGRRA | |
| | RPTSPELESSDDSYVSAGEEPLEAPVFETPLQNVVVAPGADVLLKCIITANPPPQVSW | |
| | HKDGSALRSEGRLLLRAEGERHTLLLREARAADAGSYMATATNELGQATCAASLTVRP | |
| | GGSTSPFSSPITSDEEYLSPPEEFPEPGETWPRTPTMKPSPSQNRRSSDTGSKAPPTF | |
| | KVSLMDQSVREGQDVIMSTRVQGEPKPVVSWLRNRQPVRPDQRRFAEEAFGGLCRLRT | |
| | LAAERGDAGFYTCKAVNEYGARQCEARLEVRAHPESRSLAVLAPLQDVDVGAGEMALF | |
| | ECLVAGPTDVEVDWLCRGRLLQPALLKCKMHFDGRKCKLLLTSVHEDDSGVYTCKLST | |
| | AKDELTCSARLTVRPSLAPLPTRLLEDVEVLEGRAARPDCKISGTPPPVVTWTHPGCP | |
| | MEESENLRLRQDGGLHSLHIAHVGSEDEGLYAVSAVNTHGQAHCSAQLYVEEPRTAAS | |
| | GPSSKLEKMPSIPEEPEQGELERLSIPDFLRPLQDLEVGLAKEAALECQVTGLPYPTI | |
| | SWFHNGHRIQSSDDRRMTQYRDVHRLVFPAVGPQHAGVYKSVIANKLGKAACYAHLYV | |
| | TDVVPGPPDGAPQVVAVTGRMVTLTWNPPRSLDMAIDPDSLTYTVQHQVLGSDQWTAL | |
| | VTGLREPGWAATGLRKGVQHIFRVLSTTVKSSSKPSPPSEPVQLLEHGPTLEEAPAML | |
| | DKPDIVYVVEGQPASVTVTFNHVEAQVVWRSCRGALLEARAGVYELSQPDDDQYCLRI | |
| | CRVSRRDMGALTCTARNRHGTQTCSVTLELAEAPRFESIMEDVFVGAGETARFAVVVE | |
| | GKPLPDIMWYKDEVLLTESSHVSFVYEENECSLVVLSTGAQDGGVYTCTAQNLAGEVS | |
| | CKAELAVHSAQTAMEVEGVGEDEDHRGRRLSDFYDIHQEIGRGAFSYLRRIVERSSGL | |
| | EFAAKPIPSQAKPKASARREARLLARLQHDCVLYFHEAFERRRGLVIVTELCTEELLE | |
| | RIARKPTVCESEIRAYMRQVLEGIHYLHQSHVLHLDVKPENLLVWDGAAGEQQVRICD | |
| | FGNAQELTPGEPQYCQYGTPEFVAPEIVNQSPVSGVTDIWPVGVVAFLCLTGISPFVG | |
| | ENDRTTLMNIRNYNVAFEETTFLSLSREARGFLIKVLVQDRLRPTAEETLEHPWFKTQ | |
| | AKGAEVSTDHLKLFLSRRRWQRSQTSYKCHLVLRPIPELLRAPPERVWVTMPRRPPPS | |
| | GGLSSSSDSEEEELEELPSVPRPLQPEFSGSRVSLTDIPTEDEALGTPETGAATPMDW | |
| | QEQGRAPSQDQEAPSPEALPSPGQEPAAGASPRRGELRRGSSAESALPRAGPRELGEG | |
| | LHKAASVELPQRRSPGPGATRLARGGLGEGEYAQRLQALRQRLLRGGPEDGKVSGLRG | |
| | PLLESLGGRARDPRMARAASSEAAPHHQPPLENRGLQKSSSFSQGEAEPRGRHRRAGA | |
| | PLEIPVARLGARRLQESPSLSALSEAQPSSPARPSAPKPSTPKSAEPSATTPSDAPQP | |
| | PAPQPAQDKAPEPRPEPVRASKPAPPPQALQTLALPLTPYAQIIQSLQLSGHAQGPSQ | |
| | GPAAPPSEPKPHAAVFARVASPPPGAPEKRVPSAGGPPVLAEKARVPTVPPRPGSSLS | |
| | SSTENLESEAVFEAKEKRSRESPLSLGLRLLSRSRSEERGPERGAEEEDGIYRPSPAG | |
| | TPLELVRRPERSRSVQDLRAVGEPGLVRRLSLSLSQRLRRTPPAQRHPAWEARGGDGE | |
| | SSEGGSSARGSPVLAMRRRLSFTLERLSSRLQRSGSSEDSGGASGRSTPLFGRLRRAT | |
| | SEGESLRRLGLPHNQLAAQAGATTPSAESLGSEASATSGSSAPGESRSRLRWGFSRPR | |
| | KDKGLSPPNLSASVQEELGHQYVRSESDFPPVFHIKLKDQVLLEGEAATLLCLPAACP | |
| | APHISWMKDKKSLRSEPSVIIVSCKDGRQLLSIPRAGKRHAGLYECSATNVLGSITSS | |
| | CTVAVARVPGKLAPPEVPQTYQDTALVLWKPGDSRAPCTYTLERRVDGESVWHPVSSG | |
| | IPDCYYNVTHLPVGVTVRFRVACANRAGQGPFSNSSEKVFVRGTQDSSAVPSAAHQEA | |
| | PVTSRPARARPPDSPTSLAPPLAPAAPTPPSVTVSRSSPPTPPSQALSSLAAVGPPPQ | |
| | TPPRRHRGLQAARPAERTLPSTHVTPSEPKRFVLDTGTPIPASTPQGVKPVSSSTRVY | |
| | VVTSFVSAPPAPEPPAPEPPPERTKVTVQSLSPAKEVVSSPGSSPPSSPRPEGTTLRQ | |
| | GPPQKPYTFLEEKARGRFGVVRACRENATGRTFVAKIVPYAAEGKRRVLQEYEVLRTL | |
| | HHERIMSLHEAYTTPRYLVLIAESCGNRELLCGLSDRPRYSEDDVATYMVQLLQGLDY | |
| | LHGHHVLHLDIKPDNLLLAPDNALKIVDPGSAQPYNPQALRPLGHRTGTLEFMAPEMV | |
| | KGEPIGSATDIWGAGVLTYIMLSGRSPFYEPDPQETEARIVGGRFDAFQLYPNTSQSA | |
| | TLPLRKVLSVHPWSRPSLQDCLAHPWLQDAYLMKLRRQTLTFTTNRLKEFLGEQRRRR | |
| | AEAATRHKVLLPSYPGGP | |
| | SEQ ID NO:39 | 860 bp |
| NOV14d, | ACGGGATCCACCATGGACCATCGAGGAAGGAGACTCAGCGACTTTTATGACATCCACC | |
| 283022671 | AGGAGATCGGCAGGGGTGCTTTCTCCTACTTGCGGCGCATAGTGGAGCGTAGCTCCGG | |
| DNA | CCTGGAGTTTGCGGCCAAGTTCATCCCCAGCCAGGCAAGCCAAGGCATCAGCGCGT | |
| Sequence | CGGGAGGCCCGGCTGCTGGCCAGGCTCCAGCACGACTGTGTCCTCTACTTCCATGAGG | |
| | CCTTCGAGAGGCGCCGGGGACTGGTCATTGTCACCGAGCTCTGCACAGAGGAGCTGCT | |
| | GGAGCGAATCGCCAGGAAACCCACCGTGTGTGAGTCTGAGATCCGGGCCTATATGCGG | |
| | CAGGTGCTAGAGGGAATACACTACCTGCACCAGAGCCACGTGCTGCACCTCGATGTCA | |
| | AGCCTGAGAACCTGCTGGTGTGGGATGGTGCTGCGGGCGAGCAGCAGGTGCGGATCTG | |
| | TGACTTTGGGAATGCCCAGGAGCTGACTCCAGGAGAGCCCCAGTACTGCCAGTATGGC | |
| | ACACCTGAGTTTGTAGCACCCGAGATTGTCAATCAGAGCCCCGTGTCTGGAGTCACTG | |
| | ACATCTGGCCTGTGGGTGTTGTTGCCTTCCTCTGTCTGACAGGAATCTCCCCGTTTGT | |
| | TGGGGAAAATGACCGGACAACATTGATGAACATCCGAAACTACAACGTGGCCTTCGAG | |
| | GAGACCACATTCCTGAGCCTGAGCAGGGAGGCCCGGGGCTTCCTCATCAAAGTGTTGG | |
| | TGCAGGACCGGCTGAGACCTACCGCAGAAGAGACCCTAGAACATCCTTGGTTCAAAAC | |
| | TCAGGCAAAGGGCGCACATCATCACCACCATCACTAGGCGGCCGCAAG | |
| | ORF Start: at 1 | ORF Stop: TAG at 847 |
| | SEQ ID NO:40 | 282 aa MW at 32254.3 kD |

| | |
|---|---|
| NOV14d, | TGSTMDHRGRRLSDFYDIHQEIGRGAFSYLRRIVERSSGLEFAAKFTPSQAKPKASAR |
| 28302267 | REARLLARLQHDCVLYFHEAFERRRGLVIVTELCTEELLERIARKPTVCESEIRAYMR |
| Protein | QVLEGIHYLHQSHVLHLDVKPENLLVWDGAAGEQQVRICDFGNAQELTPGEPQYCQYG |
| Sequence | TPEFVAPEIVNQSPVSGVTDIWRVGVVAFLCLTGISPFVGENDRTTLMNIRNYNVAFF |
| | ETTFLSLSREARGFLIKVLVQDRLRPTAEETLEHPWFKTQAKGAHHHHHH |

[0391] Sequence comparison of the above protein sequences yields the following sequence relationships shown in Table 14B.

TABLE 14B
Comparison of NOV14a against NOV14b through NOV14d.

| Protein | NOV14a Residues/ | Identities/Similarities |
|---|---|---|
| Sequence | Match Residues | for the Matched Region |
| NOV14b | 1 . . . 3114 | 2619/3114 (84%) |
| | 1 . . . 3114 | 2623/3114 (84%) |
| NOV14c | 1 . . . 3114 | 2532/3129 (80%) |
| | 1 . . . 3070 | 2536/3129 (80%) |
| NOV14d | 1572 . . . 1846 | 249/275 (90%) |
| | 2 . . . 276 | 249/275 (90%) |

[0392] Further analysis of the NOV14a protein yielded the following properties shown in Table 14C.

TABLE 14C
Protein Sequence Properties NOV14a

| | |
|---|---|
| PSort | 0.6000 probability located in endoplasmic reticulum |
| analysis: | (membrane); 0.3500 probability located in nucleus; 0.3000 |
| | probability located in microbody (peroxisome); 0.1000 |
| | probability located in mitochondrial inner membrane |
| SignalP | No Known Signal Sequence Predicted |
| analysis: | |

[0393] A search of the NOV14a protein against the Geneseq database, a proprietary database that contains sequences published in patents and patent publication, yielded several homologous proteins shown in Table 14D.

TABLE 14D
Geneseq Results for NOV14a

| | | | Identities/ | |
|---|---|---|---|---|
| | | NOV14a | Similarities | |
| | Protein/ | Residues/ | for the | |
| Geneseq | Organism/Length | Match | Matched | Expect |
| Identifier | [Patent #, Date] | Residues | Region | Value |
| AAE19160 | Human kinase | 960 . . . 3114 | 2133/2155 | 0.0 |
| | polypeptide | | (98%) | |
| | (PKIN-18)— | 88 . . . 2242 | 2137/2155 | |
| | Homo sapiens, | | (98%) | |
| | 2380 aa. | | | |
| | [WO200208399- | | | |
| | A2, 31 JAN. | | | |
| | 2002] | | | |
| AAB65635 | Novel protein | 967 . . . 3114 | 2127/2148 | 0.0 |
| | kinase, SEQ ID | | (99%) | |
| | NO: 162—Homo | 1 . . . 2148 | 2130/2148 | |
| | sapiens, 2286 aa | | (99%) | |
| | [WO200073469- | | | |
| | A2, 7 DEC. | | | |
| | 2000] | | | |
| AAY70078 | Human striated | 321 . . . 957 | 600/645 | 0.0 |
| | muscle | | (93%) | |
| | preferentially | 13 . . . 656 | 602/645 | |
| | expressed partial | | (93%) | |
| | protein—Homo | | | |
| | sapiens, 661 aa. | | | |
| | [WO200009689- | | | |
| | A2, 24 FEB. | | | |
| | 2000] | | | |
| AAW77048 | Human striated | 321 . . . 957 | 600/645 | 0.0 |
| | muscle | | (93%) | |
| | preferentially | 13 . . . 656 | 602/645 | |
| | expressed | | (93%) | |
| | protein—Homo | | | |
| | sapiens, 661 aa. | | | |
| | [WO9835040-A2, | | | |
| | 13 AUG. 1998] | | | |
| AAY70079 | Mouse striated | 365 . . . 957 | 553/594 | 0.0 |
| | muscle | | (93%) | |
| | preferentially | 4 . . . 597 | 566/594 | |
| | expressed partial | | (95%) | |
| | protein—Mus sp, | | | |
| | 602 aa. | | | |
| | [WO200009689- | | | |
| | A2, 24 FEB. | | | |
| | 2000] | | | |

[0394] In a BLAST search of public sequence databases, the NOV14a protein was found to have homology to the proteins shown in the BLASTP data in Table 14E.

TABLE 14E
Public BLASTP Results for NOV14a

| | | | Identities/ | |
|---|---|---|---|---|
| | | NOV14a | Similarities | |
| Protein | | Residues/ | for the | |
| Accession | Protein/ | Match | Matched | Expect |
| Number | Organism/Length | Residues | Portion | Value |
| Q9EQJ5 | Striated muscle- | 1 . . . 3114 | 2776/3134 | 0.0 |
| | specific serine/ | | (88%) | |
| | threonine protein | 1 . . . 3124 | 2865/3134 | |
| | kinase—Mus | | (90%) | |
| | musculus | | | |
| | (Mouse), 3262 aa. | | | |
| Q9P2P9 | KIAA1297 | 967 . . . 3114 | 2127/2148 | 0.0 |
| | protein—Homo | | (99%) | |
| | sapiens (Human), | 1 . . . 2148 | 2130/2148 | |
| | 2242 aa | | (99%) | |
| | (fragment). | | | |
| CAC16626 | Sequence 5 from | 1027 . . . 2315 | 388/1328 | e−123 |
| | Patent | | (29%) | |
| | WO0063381— | 620 . . . 1784 | 569/1328 | |
| | Homo sapiens | | (42%) | |
| | (Human), | | | |
| | 2596 aa. | | | |
| CAC16625 | Sequence 3 from | 1476 . . . 2315 | 299/873 | e−112 |
| | Patent | | (34%) | |
| | WO0063381— | 5 . . . 798 | 418/873 | |
| | Homo sapiens | | (47%) | |
| | (Human), | | | |
| | 1610 aa. | | | |
| Q15772 | Aortic | 850 . . . 957 | 108/108 | 4e−56 |
| | preferentially | | (100%) | |
| | expressed protein | 1 . . . 108 | 108/108 | |
| | 1 (APEG-1)— | | (100%) | |
| | Homo sapiens | | | |
| | (Human), 113 aa. | | | |

[0395] PFam analysis predicts that the NOV14a protein contains the domains shown in the Table 14F.

TABLE 14F
Domain Analysis of NOV14a

| Pfam | NOV14a | Identities/Similarities | Expect |
|---|---|---|---|
| Domain | Match Region | for the Matched Region | Value |
| Ig | 57 . . . 110 | 16/57 (28%) | 0.00069 |
| | | 40/57 (70%) | |
| Ig | 736 . . . 796 | 13/64 (20%) | 1.1e−06 |
| | | 43/64 (67%) | |
| Ig | 883 . . . 944 | 18/65 (28%) | 5.9e−07 |
| | | 47/65 (72%) | |
| Ig | 967 . . . 1028 | 19/65 (29%) | 1.2e−07 |
| | | 40/65 (62%) | |
| Ig | 1063 . . . 1119 | 17/60 (28%) | 0.012 |
| | | 39/60 (65%) | |
| Ig | 1187 . . . 1243 | 14/60 (23%) | 0.0018 |
| | | 41/60 (68%) | |
| Fn3 | 1267 . . . 1356 | 22/91 (24%) | 0.00055 |
| | | 55/91 (60%) | |
| Ig | 1484 . . . 1544 | 15/64 (23%) | 8e−05 |
| | | 39/64 (61%) | |
| Rhabd_nucleocap | 1587 . . . 1608 | 6/22 (27%) | 0.75 |
| | | 18/22 (82%) | |
| Pkinase | 1586 . . . 1839 | 73/297 (25%) | |
| | | 181/297 (61%) | 2.9e−47 |
| Ig | 2583 . . . 2644 | 14/65 (22%) | 9.6e−06 |
| | | 40/65 (62%) | |
| Fn3 | 2663 . . . 2745 | 20/87 (23%) | 0.064 |
| | | 51/87 (59%) | |
| Pkinase | 2951 . . . 3092 | 47/143 (33%) | 1.8e−37 |
| | | 110/143 (77%) | |

### Example 15

[0396] The NOV15 clone was analyzed and the neucleoticle and encoded polypeptide sequences are shorn in Table 15A.

TABLE 15A
NOV15 Sequence Analysis

| | SEQ ID NO:41 | 3109 bp |
|---|---|---|
| NOV15a, | AGGGGCTGAGGAGGTACTGGAAPAGAAAAAGAGGAGCAGGAGCTGGAGGAAGACGTGGAG | |
| CG124553-01 | GAGGAGCTGGAGGAGGATGAAGAGAAGGAGTGGGACGCCCACPACCCTGTGTAAGGAG | |
| DNA | CTCAAGTACTCCAAGGACCCGCCCCAGATATCCATCATATTCATCTTCGTGAACGAGG | |
| Sequence | CCCTGTCGGTGATCCTGCGGTCCGTGCACAGTGCCGTCAATCACACGCCCACACACCT | |
| | GCTGAAGGAAATCATTCTGGTGGATGACAACAGCGACGAAGAGGAGCTGAAGGTCCCC | |
| | CTAGAGGAGTATGTCCACAAACGCTACCCCGGGCTGGTGAAGGTGGTAAGAAATCAGA | |
| | AGAGGGAAGGCCTGATCCGCGCTCGCATTGAGGGCTGGAAGGTGGCTACCGGGCAGGT | |
| | CACTGGCTTCTTTGATGCCCACGTGGAATTCACCGCTGGCTGGGCTGAGCCGGTTCTA | |
| | TCCCGCATCCAGGAAAACCGGAAGCGTGTGATCCTCCCCTCCATTGACAACATCAAAC | |
| | AGGACAACTTTGAGGTGCAGCGGTACGAGAACTCGGCCCACGGGTACAGCTGGGAGCT | |
| | GTGGTGCATGTACATCAGCCCCCCAAAAGACTGGTGGGACGCCGGAGACCCTTCTCTC | |
| | CCCATCAGGACCCCAGCCATGATAGGCTGCTCGTTCGTGGTCAACAGGAAGTTCTTCG | |
| | GTGAAATTGGTCTTCTGGATCCTGGCATGGATGTATACGGAGGAGAAAATATTGAACT | |
| | GGGAATCAAGGTATGGCTCTGTGGGGGCAGCATGGAGGTCCTTCCTTGCTCACGGGTG | |
| | GCCCACATTGAGCGGAAGAAGAAGCCATATAATAGCAACATTGGCTTCTACACCAAGA | |
| | GGAATGCTCTTCGCGTTGCTGAGGTCTGGATGGACGATTACAAGTCTCATGTGTACAT | |
| | AGCGTGGAACCTGCCGCTGGAGAATCCGGGAATTGACATCGGTGATGTCTCCGAAAGA | |
| | AGAGCATTAAGGAAAAGTTTAAAGTGTAAGAATTTCCAGTGGTACCTGGACCATGTTT | |
| | ACCCAGAAATGAGAAGATACAATAATACCGTTGCTTACGGGGAGCTTCGCAACAACAAA | |
| | GGCAAAAGACGTCTGCTTGGACCAGGGGCCGCTGGAGAACCACACAGCAATATTGTAT | |
| | CCGTGCCATGGCTGGGGACCACAGCTTGCCCGCTACACCAAGGAAGGCTTCCTGCACT | |
| | TGGGTGCCCTGGGGACCACCACACTCCTCCCTGACACCCGCTGCCTGGTGGACAACTC | |
| | CAAGAGTCGGCTGCCCCAGCTCCTGGACTGCGACAAGGTCAAGAGCAGCCTGTACAAG | |
| | CGCTGGAACTTCATCCAGAATGGAGCCATCATGAACAAGGGCACGGGACGCTGCCTGG | |
| | AGGTGGAGAACCGGGGCCTGGCTGGCATCGACCTCATCCTCCGCAGCTGCACAGGTCA | |
| | GAGGTGGACCATTAAGAACTCCATCAAGTAGAGGGAGGGAGCTGGGGCACTGGAGCCT | |
| | GGCCCCCAGGACATGGCTGCTCCCCCCAACATCTGGACCAGCTGCCCTGGCGGAGAGA | |
| | CAGCAAGGGGCCGGCAGGTGCTCGATGGGCCCCCCAGGGCTTCTCCAGGGCAGCACAG | |
| | GGACCCCGGATGAAGACTCTGTCCCCCCTCAGGCATTCAGCTGCCCACAAGTTTCCTG | |
| | CACCCTGGAAAAGCCCCCCACCCTTCCTCTGGGAAACTGACAGCTGTCTTCCACAGCC | |
| | TCTGATGTGGACCTGGTACTGAGGAGCAAGACTGTCCAGTTCTCCTCCACATCTCCCA | |
| | TCCCAGAATCAGGATCTGGGACTGGCAGGGTCCCCTCCTGTGTCTCATCTCTTGCAGC | |
| | AGCAGCTGCTGAACTCCAGCCATCAACACGGTGGGAGGCAGCGGGGGCTTCAGCCATG | |
| | TCCTAGCTCCCCGCCCTAAAAGGAGGCAGTGAGGACCAGGCACTATTTCCTCCGAGGT | |
| | TACTTCTACCCAGATGACACCTGCCTGTTCACGCCCCAAGGCAGCTACTGCCCCTAAC | |
| | CCTTCCCACCAGGGTAGCTTTGGGCACTGCAGCTCTGGACTTTTCTGGCCCCTCCTGA | |
| | GATGACCTGATGGAGCTGATGCTTTCTCTCCTAATCCCTGGGCACTAGGCTCTTATCA | |
| | GTGTGCTTGGGCCAGCTCTCCTGCCTGTGTCTAGAGGAAGCCAGAGACAGAAATAGGC | |
| | TAAGCCTGCAGTAGGATCTCAGCCACAAGGGCCCCGCAGGATGGAGCTGGGTCAAGGA | |
| | CCAGGGAGCCCTGACTCCCAGAGGCTGCCACCGGGGAGAAGCAGCGGTCCTCCATCCA | |
| | GAACCTAAGGGCTGAAGCAAAGGCTGCCAGGACCCTTGAAGATGCTTTTGGCTCACCT | |
| | CATTTCACCCCACGCTCTGCTGGCTGGCAGAGGAGAAGGCAGTCGTTTCCTCTCTGAA | |
| | GAGTATTTTTTTCGATTGCCCTCTGGTTAGGGTGCACATATAAATCAGAGTTAATATA | |
| | TGAACGCGTGTGCATGCACAAGTGTGTGTGTGCCTGCGTGCTGTGCGTGGCAGGGTGT | |
| | GTGTGTGTGTGTCTGGCTGTGCGTTCCGGAGTGTGTGACGATGCTGACCTAGCTGTGT | |
| | GGCCTTGGGCTTGCTGCTTCATTACTCACCTGGATGGGGACGAGGGATGAGAAGGGTG | |
| | TGGGTTTGGCCCCATGTCACTGGCCGGAAGGATGTGTCTCAGCCCTGCCCTGTGGGGT | |
| | GCCCCCGATGGGAGGCTGTCCCATCTCCCAGTCCCCATCTCTTTTTCCCCACACTGTC | |
| | CCTGGCCAAGCCCTGCCCAGAGCTGAACCCTGTAGCTGCCCCCTTGCCCTGTGTGGGA | |
| | TTCGCAGTGTCTCATTTGGTGACGTCTTACTGGTGATCATCTCCTCACCCCATCTCCC | |
| | ACCTTGTGGAATAAATACATGTTAGCACTTCCCAGAGCAGCCTCCTTTGTGTCTTGAT | |
| | TTCTCCAGAACTGGAGGTGGGGAGGGGAGTGATGGAGACATAGGAGGAGAGCTTCTTT | |
| | GGCTTTGAGGGTTTAGTGTTACTTATTTATCTATTTATTCGAGATGGGGTCTTGCTCT | |
| | GTGGCCCAGGCTGGAGTGCAGTGGTGCAATCATGA | |
| | ORF Start: ATG at 75 | ORF Stop: TAG at 1479 |
| | SEQ ID NO:42 | 468 aa MW at 53596.1 kD |
| NOV15a, | MKRRSGTPTTLCKELKYSKDPPQISIIFIPVNEALSVILRSVHSAVNHTPTHLLKEII | |
| CG124553-01 | LVDDNSDEEELKVPLEEYVHKRYRGLVKVVRNQKREGLIRARTEGWKVATGQVTGFFD | |
| Protein | AHVEFTAGWAEPVLSRIQENRKRVILPSIDNIKQDNFEVQRYENSAHGYSWELWCMYI | |
| Sequence | SPPKDWWDAGDPSLPIRTPAMIGCSFVVNRKPFGEIGLLDPGMDVYGGENIELGIKVW | |
| | LCGGSMEVLPCSRVAHIERKKKRYNSNTGPYTKRNALRVAEVWMDDYKSHVYIAWNLP | |
| | LENPGIDIGDVSERRALRKSLKCKNFQWYLDHVYPEMRRYNNTVAYGELRNNKAKDVC | |
| | LDQGPLFNHTAILYPCHGWGPQLARYTKEGFLHLGALGTTTLLPDTRCLVDNSKSRLP | |
| | QLLDCDKVKSSLYKRWNFIQNGAIMNKGTGRCLEVENRGLAGIDLILRSCTGQRWTIK | |
| | NSIK | |
| | SEQ ID NO:43 | 580 bp |
| NOV15b, | CACCAGATCTTCCATCATATTCATCTTCGTGAACGAGGCCCTGTCGGTGATCCTGCGG | |
| 276644723 | TCCGTGCACAGTGCCGTCAATCACACGCCCACACACCTGCTGAAGGAAAAATCATTCTGG | |
| DNA | TGGATGACAAACAGCGACGAAGAGGAGCTGAAGGTCCCCCTAGAGGAGTATGTCCACAAA | |
| Sequence | ACGCTACCCCGGGCTGGTGAAGGTGGTAAGAATCAGAAGAGGGAAGGCCTGATCCGC | |
| | GCTCGCATTGAGGGCTGGAAGGTGGCTACCGGGCAGGTCACTGGCTTCTTTGATGCCC | |
| | ACGTGGAATTCACCGCTGGCTGGGCTGAGCCGGTTCTATCCCGCATCCAGGAAAACCG | |
| | GAAGCGTGTGATCCTCCCCTCCATTGACAACATCAAACAGGACAACTTTGAGGTGCAG | |
| | CGGTACGAGAACTCGGCCCACGGGTACAGCTGGGAGCTGTGGTGCATGTACATCAGCC | |
| | CCCCAAAAGACTGGTGGGACGCCGGAGACCCTTCTCTCCCCATCAGGACCCCAGCCAT | |
| | GATAGGCTGCTCGTTCGTGGTCAACAGGAAGTTCTTCGGTGAAATTGGTCTCGAGGGC | |
| | ORF Start: at 2 | ORF Stop: end of sequence |
| | SEQ ID NO:44 | 193 aa MW at 22163.1 kD |
| NOV15b, | TRSSIIFTFVNEALSVILRSVHSAVNHTPTHLLKEIILVDDNSDEEELKVPLEEYVHK | |
| 276644723 | RYPGLVKVVRNQKREGLTRARIEGWKVATGQVTGFFDAHVEFTAGWAEPVLSRIQENR | |
| Protein | KRVILPSIDNIKQDNFEVQRYENSAHGYSWELWCMYISPPKDWWDAGDPSLPIRTPAM | |
| Sequence | IGCSFVVNRKPFGEIGLEG | |
| | SEQ ID NO:45 | 495 bp |
| NOV15c, | CACCAGATCTTCCATCATATTCATCTTCGTGAACGAGGCCCTGTCGGTGATCCTGCGG | |
| 276644750 | TCCGTGCACAGTGCCGTCAATCACACGCCCACACACCTGCTGAAGGAAATCATTCTGG | |
| DNA | TGGATGACAACAGCGACGAAGAGGAGCTGAAGGTCCCCCTAGAGGAGTATGTCCACAA | |
| Sequence | ACGCTACCCCGGGCTGGTGAAGGTGGTAAGAAATCAGAAGAGGGAAGGCCTGATCCGC | |
| | GCTCGCATTGAGGGCTGGAAGGTGGCTACCGGGCAGGTCACTGGCTTCTTTGATGCCC | |
| | ACGTGGAATTCACCGCTGGCTGGGCTGAGCCGGTTCTATCCCGCATCCAGGAAAACCG | |
| | GAAGCGTGTGATCCTCCCCTCCATTGACAACATCAAACAGGACAACTTTGAGGTGCAG | |
| | CGGACCCCAGCCATGATAGGCTGCTCGTTCGTGGTCAACAGGAAGTTCTTCGGTGAAA | |
| | TTGGTCTCGAGGGCAAGGGCGAATTCCAGCA | |
| | ORF Start: at 2 | ORF Stop: at 494 |
| | SEQ ID NO:46 | 164 aa MW at 18699.3 kD |

| | |
|---|---|
| NOV15c, | TRSSITFIFVNEALSVILRSVHSAVNHTPTHLLKEIILVDDNSDEEFLKVPLEEYVHK |
| 276644750 | RYPGLVKVVRNQKREGLIRARIFGWKVATGQVTGFFDAHVFFTAGWAERVLSRTQENR |
| Protein | KRVILPSIDNIKQDNFEVQRTRANIGCSFVVNRKFFGEIGLFGKGEPQ |
| Sequence | |

[0397] sequence comparison of the above protein sequences yields the following sequence relationships shown in Table 15B.

TABLE 15B
Comparison of NOV15a against NOV15b and NOV15c.

| Protein | NOV15a Residues/ | Identities/Similarities |
|---|---|---|
| Sequence | Match Residues | for the Matched Region |
| NOV15b | 25 . . . 212 | 188/188 (100%) |
| | 4 . . . 191 | 188/188 (100%) |
| NOV15c | 25 . . . 216 | 155/192 (80%) |
| | 4 . . . 161 | 155/192 (80%) |

[0398] Further analysis of the NOV15a protein yielded the following properties shown in Table 15C.

TABLE 15C
Protein Sequence Properties NOV15a

| | |
|---|---|
| PSort | 0.7900 probability located in plasma membrane; 0.3488 |
| analysis: | probability located in microbody (peroxisome); 0.3000 |
| | probability located in Golgi body; 0.3000 probability located |
| | in nucleus |
| SignalP | No Known Signal Sequence Predicted |
| analysis: | |

[0399] A search of the NOV15a protein against the Geneseq database, a proprietary database that contains sequences published in patents and patent publication, yielded several homologous proteins shown in Table 15D.

TABLE 15D
Geneseq Results for NOV15a

| | | | Identities/ | |
|---|---|---|---|---|
| | | NOV15a | Similarities | |
| | Protein/ | Residues/ | for the | |
| Geneseq | Organism/Length | Match | Matched | Expect |
| Identifier | [Patent #, Date] | Residues | Region | Value |
| AAM41675 | Human polypeptide | 10 . . . 468 | 457/459 | 0.0 |
| | SEQ ID NO 6606— | | (99%) | |
| | Homo sapiens, | 102 . . . 560 | 457/459 | |
| | 560 aa. | | (99%) | |
| | [WO200153312-A1, | | | |
| | 26 JUL. 2001] | | | |
| AAM40865 | Human polypeptide | 167 . . . 468 | 302/302 | 0.0 |
| | SEQ ID NO 5796— | | (100%) | |
| | Homo sapiens, | 5 . . . 306 | 302/302 | |
| | 358 aa. | | (100%) | |
| | [WO200153312-A1, | | | |
| | 26 JUL. 2001] | | | |
| AAM39079 | Human polypeptide | 172 . . . 468 | 296/297 | 0.0 |
| | SEQ ID NO 2224— | | (99%) | |
| | Homo sapiens, | 1 . . . 297 | 296/297 | |
| | 297 aa. | | (99%) | |
| | [WO200153312-A1, | | | |
| | 26 JUL. 2001] | | | |
| AAM40398 | Human polypeptide | 101 . . . 468 | 237/370 | e−152 |
| | SEQ ID NO 3543— | | (64%) | |
| | Homo sapiens, | 29 . . . 398 | 298/370 | |
| | 402 aa. | | (80%) | |
| | [WO200153312-A1, | | | |
| | 26 JUL. 2001] | | | |
| AAM42184 | Human polypeptide | 160 . . . 468 | 198/311 | e−125 |
| | SEQ ID NO 7115— | | (63%) | |
| | Homo sapiens, | 1 . . . 311 | 250/311 | |
| | 315 aa. | | (79%) | |
| | [WO200153312-A1, | | | |
| | 26 JUL. 2001] | | | |

[0400] In a BLAST search of public sequence databases, the NOV15a protein as found to have homology to the proteins shown in the BLASTP data in Table 5E.

TABLE 15E
Public BLASTP Results for NOV15a

| | | NOV15a | Identities/ | |
|---|---|---|---|---|
| Protein | | Residues/ | Similarities for | |
| Accession | Protein/ | Match | the Matched | Expect |
| Number | Organism/Length | Residues | Portion | Value |
| AAM62306 | Putative poly- | 10 . . . 468 | 457/459 (99%) | 0.0 |
| | peptide N-acetyl- | 140 . . . 598 | 457/459 (99%) | |
| | galactosaminyl- | | | |
| | transferase— | | | |
| | Homo sapiens | | | |
| | (Human), 598 aa. | | | |
| AAM62404 | Williams-Beuren | 10 . . . 468 | 447/459 (97%) | 0.0 |
| | syndrome critical | 140 . . . 596 | 450/459 (97%) | |
| | region gene 17— | | | |
| | Mus musculus | | | |
| | (Mouse), 596 aa. | | | |
| Q9GM01 | UDP-GalNAc: | 12 . . . 468 | 303/459 (66%) | 0.0 |
| | polypeptide N- | 144 . . . 602 | 377/459 (82%) | |
| | acetylgalactos- | | | |
| | aminyl- | | | |
| | transferase— | | | |
| | Macaca | | | |
| | fascicularis (Crab | | | |
| | eating macaque) | | | |
| | (Cynomolgus | | | |
| | monkey), 606 aa. | | | |
| Q9HCQ5 | UDP-GalNAc: | 12 . . . 468 | 302/459 (65%) | 0.0 |
| | polypeptide N- | 141 . . . 599 | 377/459 (81%) | |
| | acetylgalactos- | | | |
| | aminyl- | | | |
| | transferase— | | | |
| | Homo sapiens | | | |
| | (Human), 603 aa. | | | |
| Q9NY28 | UDP-N-acetyl- | 12 . . . 468 | 219/461 (47%) | e−129 |
| | alpha-D-galactos- | 171 . . . 629 | 310/461 (66%) | |
| | amine:poly- | | | |
| | peptide N-acetyl- | | | |
| | galactosaminyl- | | | |
| | transferase 8— | | | |
| | Homo sapiens | | | |
| | (Human), 637 aa. | | | |

[0401] PFam analysis predicts that the NOV15a protein contains the domains shown in the Table 15F.

TABLE 15F
Domain Analysis of NOV15a

| Pfam | NOV15a | Identities/Similarities | Expect |
|---|---|---|---|
| Domain | Match Region | for the Matched Region | Value |
| Glycos_transf_2 | 25 . . . 211 | 45/189 (24%) | 2.4e−31 |
| | | 143/189 (76%) | |
| Ricin_B_lectin | 428 . . . 466 | 13/47 (28%) | 0.14 |
| | | 29/47 (62%) | |

### Example 16

[0402] The NOV16 clone was analyzed, and the nucleotide and encoded polypeptide sequences are shown in Table 16A.

TABLE 16A
NOV16 Sequence Analysis

| | |
|---|---|
| SEQ ID NO: 47 | 2422 bp |

| | |
|---|---|
| NOV16a, | CGCCAAGGCAGCCGGCGCTGGCGATGGGAAGCGGCGTGGCCGCCGACACAGGCAGTGG |
| CG124691- | |
| 01 DNA | CAAAGTTTCCCAGACGTACACATCTGGACGCGCGGCTGCCGGCTACCCGTGACCCCTC |
| Sequence | |
| | TAGGAAGGGTTCAGGGATTTTTAATTTGGAAAAAAATCCACCTGGTTTCCTTTGTCAA |
| | GGTCTCTCCGGGTGGCCAGCGGCAGGAGCTGCAAACTTGGGCACGGCGGCTACACCGG |
| | CAGCGGACCGGGCTTTGGAGAACCTCGGGACTCAGGTGCTGAGGTGCCCAGCGGCTCC |
| | GGACGTGCTACGGGGTGCGAGCGCGGGGGAGTTCGGGGCGCACGACAAGGAAGGGCCC |
| | CCGGGAGCTCTATATGGAGGAAGGAGCCCAGAATGGTGTGCACCAGGAAGACCAAAAC |
| | TTTGGTGTCCACTTGCGTGATCCTGAGCGGCATGACTAACATCATCTGCCTGCTCTAC |
| | GTGGGCTGGGTCACCAACTACATCGCCAGCGTGTATGTGCGGGGGCAGGAGCCGGCGC |
| | CCGACAAGAAGCTGGAGGAAGACAAAGGGGACACTCTGAAGATTATTGAGCGGCTGGA |
| | CCACCTGGAGAATGTCATCAAGCAGCACATTCAAGAGGCTCCTGCCAAGCCTGAGGAG |
| | GCAGAGGCCGAGCCCTTCACAGACTCCTCTCTGTTTGCACACTGGGGCCAGGAGCTCA |
| | GCCCCGAAGGCCGGCGCGTGGCCCTGAAGCAATTCCAGTACTACGGCTACAACGCCTA |
| | CCTCAGCGACCGCCTGCCCCTGGACCGGCCCCTGCCTGACCTCAGACCCAGTGGGTGC |
| | CGTAACCTCTCATTTCCTGACAGCCTGCCAGAGGTGAGCATCGTGTTCATCTTCGTCA |
| | ATGAAGCGCTTTCAGTGCTGCTGCGCTCCATCCACTCGGCCATGGAACGCACGCCCCC |
| | ACATCTGCTCAAGGAGATCATTCTGGTGGATGACAACAGCAGTAACGAGGAACTGAAG |
| | GAGAAGCTGACCGAATATGTGGACAAGGTGAACAGCCAGAAGCCAGGCTTCATCAAAG |
| | TCGTGCGTCACAGCAAGCAGGAAGGCCTCATCCGCTCCAGGGTCAGTGGCTGGAGGGC |
| | GGCCACTGCCCCTGTGGTGGCACTCTTTGATGCCCACGTGGAGTTCAATGTGGGCTGG |
| | GCTGAACCTGTACTCACCCGCATCAAGGAGAACCGGAAGCGGATCATCTCGCCATCCT |
| | TTGATAACATCAAATATGACAACTTTGAGATAGAAGAGTACCCGCTGGCTGCCCAGGG |
| | CTTTGACTGGGAGCTGTGGTGCCGCTACCTAAATCCCCCCAAGGCCTGGTGGAAGCTG |
| | GAGAACTCCACAGCGCCAATCAGGAGCCCTGCCCTCATTGGCTGCTTCATTGTGGACC |
| | GGCAGTACTTCCAGGAGATCGGCCTGCTGGACGAAGGCATGGAAGTCTACGGGGGCGA |
| | GAATGTGGAGCTTGGGATCAGGGTGTGGCAGTGTGGCGGGAGTGTGGAGGTCCTGCCC |
| | TGCTCACGGATTGCCCACATTGAGCGAGCCCACAAGCCCTACACAGAGGACCTCACCG |
| | CCCATGTCCGCAGGAACGCTCTCAGGGTGGCTGAAGTCTGGATGGATGAATTTAAAAG |
| | CCACGTCTACATGGCATGGAACATACCGCAGGAGGACTCAGGAATTGACATGGGGGAC |
| | ATCACGGCAAGGAAGGCTCTCAGGAAACAGCTGCAGTGCAAGACCTTCCGGTGGTACC |
| | TGGTCAGCGTGTACCCAGAGATGAGGATGTACTCCGACATCATTGCCTATGGAGTGCT |
| | GCAGAATTCTCTGAAGACTGATTTGTGTCTTGACCAGGGGCCAGATACAGAGAATGTC |
| | CCCATCATGTACATCTGCCATGGGATGACGCCTCAGAACGTGTACTACACGAGCAGTC |
| | AGCAGATCCATGTGGGCATTCTGAGCCCCACCGTGGATGATGATGACAACCGATGCCT |
| | GGTGGACGTCAACAGCCGGCCCCGGCTCATCGAATGCAGCTACGCCAAAGCCAAGAGG |
| | ATGAAGCTGCACTGGCAGTTCTCTCAGGGAGGACCCATCCAGAACCGCAAGTCCAAGC |
| | GCTGTCTGAAGCTGCAGGAGAATAGCGACCTGGAGTTCGGCTTCCAGCTGGTGTTGCA |
| | GAAGTGCTCGGGCCAGCAAGGGAGCATCACCAACGTCCTGAGGAGCCTCGCGTCCTGA |
| | CCCACCGGGGCCACTTCCGTGCTGCCTCTTTGCTACTGTGTAGCACCTGCTGCAACAT |
| | TGCCTGCTGTCCACGTGGGGTTGTTTGGAGTCTGGGGAACCAGGTTAGTGGGCCCCCA |
| | AGAAGAGCTTTTTATTTCCTATTCAATTTTCATGGAGTTTATAGAAAGATGCTGATTG |
| | GTAGGTGATGGTATGATATCAAACTATTTTGCAGTTGTAAATAG |

| | |
|---|---|
| ORF Start: ATG at 381 | ORF Stop: TGA at 2202 |

| | | |
|---|---|---|
| SEQ ID NO: 48 | 607 aa | MW at 69438.7 kD |

| | |
|---|---|
| NOV16a, | MVCTRKTKTLVSTCVILSGMTNIICLLYVGWVTNYIASVYVRGQEPAPDKKLEFDKGD |
| CG124691- | |
| 01 Protein | TLKIIERLDHLENVIKQHIQEAPAKPEEAEAEPFTDSSLFAHWGQELSPEGRRVALKQ |
| Sequence | |
| | FQYYGYNAYLSDRLPLDRPLPDLRPSGCRNLSFPDSLPEVSIVFIFVNEALSVLLRSI |
| | HSAMERTPPHLLKEIILVDDNSSNEELKEKLTEYVDKVNSQKPGFIKVVRHSKQEGLI |
| | RSRVSGWRAATAPVVALFDAHVEFNVGWAEPVLTRIKENRKRIISPSFDNIKYDNFEI |
| | EEYPLAAQGFDWELWCRYLNPPKAWWKLENSTAPIRSPALIGCFIVDRQYFQEIGLLD |
| | EGMEVYGGENVELGIRVWQCGGSVEVLPCSRIAHIERAHKPYTEDLTAHVRRNALRVA |
| | EVWMDEFKSHVYMAWNIPQEDSGIDMGDITARKALRKQLQCKTFRWYLVSVYPEMRMY |
| | SDIIAYGVLQNSLKTDLCLDQGPDTENVPIMYICHGMTPQNVYYTSSQQIHVGILSPT |
| | VDDDDNRCLVDVNSRPRLIECSYAKAKRMKLHWQFSQGGPIQNRKSKRCLKLQENSDL |
| | EFGFQLVLQKCSGQQGSITNVLRSLAS |

| | |
|---|---|
| SEQ ID NO: 49 | 2422 bp |

| | |
|---|---|
| NOV16b, | CGCCAAGGCAGCCGGCGCTGGCGATGGGAAGCGGCGTGGCCGCCGACACAGGCAGTGG |
| CG124691- | |
| 01 DNA | CAAAGTTTCCCAGACGTACACATCTGGACGCGCGGCTGCCGGCTACCCGTGACCCCTC |
| Sequence | |
| | TAGGAAGGGTTCAGGGATTTTTAATTTGGAAAAAAATCCACCTGGTTTCCTTTGTCAA |
| | GGTCTCTCCGGGTGGCCAGCGGCAGGAGCTGCAAACTTGGGCACGGCGGCTACACCGG |
| | CAGCGGACCGGGCTTTGGAGAACCTCGGGACTCAGGTGCTGAGGTGCCCAGCGGCTCC |
| | GGACGTGCTACGGGGTGCGAGCGCGGGGGAGTTCGGGGCGCACGACAAGGAAGGGCCC |
| | CCGGGAGCTCTATATGGAGGAAGGAGCCCAGAATGGTGTGCACCAGGAAGACCAAAAC |
| | TTTGGTGTCCACTTGCGTGATCCTGAGCGGCATGACTAACATCATCTGCCTGCTCTAC |
| | GTGGGCTGGGTCACCAACTACATCGCCAGCGTGTATGTGCGGGGGCAGGAGCCGGCGC |
| | CCGACAAGAAGCTGGAGGAAGACAAAGGGGACACTCTGAAGATTATTGAGCGGCTGGA |
| | CCACCTGGAGAATGTCATCAAGCAGCACATTCAAGAGGCTCCTGCCAAGCCTGAGGAG |
| | GCAGAGGCCGAGCCCTTCACAGACTCCTCTCTGTTTGCACACTGGGGCCAGGAGCTCA |
| | GCCCCGAAGGCCGGCGCGTGGCCCTGAAGCAATTCCAGTACTACGGCTACAACGCCTA |
| | CCTCAGCGACCGCCTGCCCCTGGACCGGCCCCTGCCTGACCTCAGACCCAGTGGGTGC |
| | CGTAACCTCTCATTTCCTGACAGCCTGCCAGAGGTGAGCATCGTGTTCATCTTCGTCA |
| | ATGAAGCGCTTTCAGTGCTGCTGCGCTCCATCCACTCGGCCATGGAACGCACGCCCCC |
| | ACATCTGCTCAAGGAGATCATTCTGGTGGATGACAACAGCAGTAACGAGGAACTGAAG |
| | GAGAAGCTGACCGAATATGTGGACAAGGTGAACAGCCAGAAGCCAGGCTTCATCAAAG |
| | TCGTGCGTCACAGCAAGCAGGAAGGCCTCATCCGCTCCAGGGTCAGTGGCTGGAGGGC |
| | GGCCACTGCCCCTGTGGTGGCACTCTTTGATGCCCACGTGGAGTTCAATGTGGGCTGG |
| | GCTGAACCTGTACTCACCCGCATCAAGGAGAACCGGAAGCGGATCATCTCGCCATCCT |
| | TTGATAACATCAAATATGACAACTTTGAGATAGAAGAGTACCCGCTGGCTGCCCAGGG |
| | CTTTGACTGGGAGCTGTGGTGCCGCTACCTAAATCCCCCCAAGGCCTGGTGGAAGCTG |
| | GAGAACTCCACAGCGCCAATCAGGAGCCCTGCCCTCATTGGCTGCTTCATTGTGGACC |
| | GGCAGTACTTCCAGGAGATCGGCCTGCTGGACGAAGGCATGGAAGTCTACGGGGGCGA |
| | GAATGTGGAGCTTGGGATCAGGGTGTGGCAGTGTGGCGGGAGTGTGGAGGTCCTGCCC |
| | TGCTCACGGATTGCCCACATTGAGCGAGCCCACAAGCCCTACACAGAGGACCTCACCG |
| | CCCATGTCCGCAGGAACGCTCTCAGGGTGGCTGAAGTCTGGATGGATGAATTTAAAAG |
| | CCACGTCTACATGGCATGGAACATACCGCAGGAGGACTCAGGAATTGACATGGGGGAC |
| | ATCACGGCAAGGAAGGCTCTCAGGAAACAGCTGCAGTGCAAGACCTTCCGGTGGTACC |
| | TGGTCAGCGTGTACCCAGAGATGAGGATGTACTCCGACATCATTGCCTATGGAGTGCT |
| | GCAGAATTCTCTGAAGACTGATTTGTGTCTTGACCAGGGGCCAGATACAGAGAATGTC |
| | CCCATCATGTACATCTGCCATGGGATGACGCCTCAGAACGTGTACTACACGAGCAGTC |
| | AGCAGATCCATGTGGGCATTCTGAGCCCCACCGTGGATGATGATGACAACCGATGCCT |
| | GGTGGACGTCAACAGCCGGCCCCGGCTCATCGAATGCAGCTACGCCAAAGCCAAGAGG |
| | ATGAAGCTGCACTGGCAGTTCTCTCAGGGAGGACCCATCCAGAACCGCAAGTCCAAGC |
| | GCTGTCTGAAGCTGCAGGAGAATAGCGACCTGGAGTTCGGCTTCCAGCTGGTGTTGCA |
| | GAAGTGCTCGGGCCAGCAAGGGAGCATCACCAACGTCCTGAGGAGCCTCGCGTCCTGA |
| | CCCACCGGGGCCACTTCCGTGCTGCCTCTTTGCTACTGTGTAGCACCTGCTGCAACAT |
| | TGCCTGCTGTCCACGTGGGGTTGTTTGGAGTCTGGGGAACCAGGTTAGTGGGCCCCCA |
| | AGAAGAGCTTTTTATTTCCTATTCAATTTTCATGGAGTTTATAGAAAGATGCTGATTG |
| | GTAGGTGATGGTATGATATCAAACTATTTTGCAGTTGTAAATAG |

| | |
|---|---|
| ORF Start: ATG at 381 | ORF Stop: TGA at 2202 |

| | | |
|---|---|---|
| SEQ ID NO: 50 | 607 aa | MW at 69438.7 kD |

| | |
|---|---|
| NOV16b, | MVCTRKTKTLVSTCVILSGMTNIICLLYVGWVTNYIASVYVRGQEPARDKKLEEDKGD |
| CG124691- | |
| 01 Protein | TLKIIERLDHLENVIKQHIQEAPAKPEFAEAEPFTDSSLFAHWGQELSPEGRRVALKQ |
| Sequence | |
| | FQYYGYNAYLSDRLPLDRPLPDLRPSGCRNLSFPDSLPEVSIVFIFVNEALSVLLRSI |
| | HSAMERTPPHLLKEIILVDDNSSNEELKEKLTEYVDKVNSQKPGFIKVVRHSKQEGLI |
| | RSRVSGWRAATAPVVALFDAHVEFNVGWAEPVLTRIKENRKRIISPSFDNIKYDNFEI |
| | EEYPLAAQGFDWELWCRYLNPPKAWWKLENSTAPIRSPALIGCFIVDRQYFQEIGLLD |
| | EGMEVYGGENVELGTRVWQCGGSVEVLPCSRIAHIERAHKPYTEDLTAHVRRNALRVA |
| | EVWMDEFKSHVYMAWNIPQEDSGIDMGDITARKALRKQLQCKTFRWYLVSVYPEMRMY |
| | SDIIAYGVLQNSLKTDLCLDQGPDTENVPIMYICHGMTPQNVYYTSSQQIHVGILSPT |
| | VDDDDNRCLVDVNSRPRLIECSYAKAKRMKLHWQFSQGGPIQNRKSKRCLKLQENSDL |
| | EFGFQLVLQKCSGQQGSITNVLRSLAS |

| | |
|---|---|
| SEQ ID NO: 51 | 2422 bp |

| | |
|---|---|
| NOV16c, | CGCCAAGGCAGCCGGCGCTGGCGATGGGAAGCGGCGTGGCCGCCGACACAGGCAGTGG |
| CG124691- | |
| 01 DNA | CAAAGTTTCCCAGACGTACACATCTGGACGCGCGGCTGCCGGCTACCCGTGACCCCTC |
| Sequence | |
| | TAGGAAGGGTTCAGGGATTTTTAATTTGGAAAAAAATCCACCTGGTTTCCTTTGTCAA |
| | GGTCTCTCCGGGTGGCCAGCGGCAGGAGCTGCAAACTTGGGCACGGCGGCTACACCGG |
| | CAGCGGACCGGGCTTTGGAGAACCTCGGGACTCAGGTGCTGAGGTGCCCAGCGGCTCC |
| | GGACGTGCTACGGGGTGCGAGCGCGGGGGAGTTCGGGGCGCACGACAAGGAAGGGCCC |
| | CCGGGAGCTCTATATGGAGGAAGGAGCCCAGAATGGTGTGCACCAGGAAGACCAAAAC |
| | TTTGGTGTCCACTTGCGTGATCCTGAGCGGCATGACTAACATCATCTGCCTGCTCTAC |
| | GTGGGCTGGGTCACCAACTACATCGCCAGCGTGTATGTGCGGGGGCAGGAGCCGGCGC |
| | CCGACAAGAAGCTGGAGGAAGACAAAGGGGACACTCTGAAGATTATTGAGCGGCTGGA |
| | CCACCTGGAGAATGTCATCAAGCAGCACATTCAAGAGGCTCCTGCCAAGCCTGAGGAG |
| | GCAGAGGCCGAGCCCTTCACAGACTCCTCTCTGTTTGCACACTGGGGCCAGGAGCTCA |
| | GCCCCGAAGGCCGGCGCGTGGCCCTGAAGCAATTCCAGTACTACGGCTACAACGCCTA |
| | CCTCAGCGACCGCCTGCCCCTGGACCGGCCCCTGCCTGACCTCAGACCCAGTGGGTGC |
| | CGTAACCTCTCATTTCCTGACAGCCTGCCAGAGGTGAGCATCGTGTTCATCTTCGTCA |
| | ATGAAGCGCTTTCAGTGCTGCTGCGCTCCATCCACTCGGCCATGGAACGCACGCCCCC |
| | ACATCTGCTCAAGGAGATCATTCTGGTGGATGACAACAGCAGTAACGAGGAACTGAAG |
| | GAGAAGCTGACCGAATATGTGGACAAGGTGAACAGCCAGAAGCCAGGCTTCATCAAAG |
| | TCGTGCGTCACAGCAAGCAGGAAGGCCTCATCCGCTCCAGGGTCAGTGGCTGGAGGGC |
| | GGCCACTGCCCCTGTGGTGGCACTCTTTGATGCCCACGTGGAGTTCAATGTGGGCTGG |
| | GCTGAACCTGTACTCACCCGCATCAAGGAGAACCGGAAGCGGATCATCTCGCCATCCT |
| | TTGATAACATCAAATATGACAACTTTGAGATAGAAGAGTACCCGCTGGCTGCCCAGGG |
| | CTTTGACTGGGAGCTGTGGTGCCGCTACCTAAATCCCCCCAAGGCCTGGTGGAAGCTG |
| | GAGAACTCCACAGCGCCAATCAGGAGCCCTGCCCTCATTGGCTGCTTCATTGTGGACC |
| | GGCAGTACTTCCAGGAGATCGGCCTGCTGGACGAAGGCATGGAAGTCTACGGGGGCGA |
| | GAATGTGGAGCTTGGGATCAGGGTGTGGCAGTGTGGCGGGAGTGTGGAGGTCCTGCCC |
| | TGCTCACGGATTGCCCACATTGAGCGAGCCCACAAGCCCTACACAGAGGACCTCACCG |
| | CCCATGTCCGCAGGAACGCTCTCAGGGTGGCTGAAGTCTGGATGGATGAATTTAAAAG |
| | CCACGTCTACATGGCATGGAACATACCGCAGGAGGACTCAGGAATTGACATGGGGGAC |
| | ATCACGGCAAGGAAGGCTCTCAGGAAACAGCTGCAGTGCAAGACCTTCCGGTGGTACC |
| | TGGTCAGCGTGTACCCAGAGATGAGGATGTACTCCGACATCATTGCCTATGGAGTGCT |
| | GCAGAATTCTCTGAAGACTGATTTGTGTCTTGACCAGGGGCCAGATACAGAGAATGTC |
| | CCCATCATGTACATCTGCCATGGGATGACGCCTCAGAACGTGTACTACACGAGCAGTC |
| | AGCAGATCCATGTGGGCATTCTGAGCCCCACCGTGGATGATGATGACAACCGATGCCT |
| | GGTGGACGTCAACAGCCGGCCCCGGCTCATCGAATGCAGCTACGCCAAAGCCAAGAGG |
| | ATGAAGCTGCACTGGCAGTTCTCTCAGGGAGGACCCATCCAGAACCGCAAGTCCAAGC |
| | GCTGTCTGAAGCTGCAGGAGAATAGCGACCTGGAGTTCGGCTTCCAGCTGGTGTTGCA |
| | GAAGTGCTCGGGCCAGCAAGGGAGCATCACCAACGTCCTGAGGAGCCTCGCGTCCTGA |
| | CCCACCGGGGCCACTTCCGTGCTGCCTCTTTGCTACTGTGTAGCACCTGCTGCAACAT |
| | TGCCTGCTGTCCACGTGGGGTTGTTTGGAGTCTGGGGAACCAGGTTAGTGGGCCCCCA |
| | AGAAGAGCTTTTTATTTCCTATTCAATTTTCATGGAGTTTATAGAAAGATGCTGATTG |
| | GTAGGTGATGGTATGATATCAAACTATTTTGCAGTTGTAAATAG |

| | |
|---|---|
| ORF Start: ATG at 381 | ORF Stop: TGA at 2202 |

| | | |
|---|---|---|
| SEQ ID NO: 52 | 607 aa | MW at 69438.7 kD |

| | |
|---|---|
| NOV16c, | MVCTRKTKTLVSTCVILSGMTNIICLLYVGWVTNYIASVYVRGQEPARDKKLEEDKGD |
| CG 124691- | |
| 01 Protein | TLKIIERLDHLENVIKQHIQEARAKPEEAEAEPFTDSSLFAHWGQELSPEGRRVALKQ |
| Sequence | |
| | FQYYGYNAYLSDRLPLDRPLPDLRPSGCRNLSFPDSLPEVSIVFIFVNEALSVLLRSI |
| | HSAMERTPPHLLKEIILVDDNSSNEELKEKLTEYVDKVNSQKPGFIKVVRHSKQEGLI |
| | RSRVSGWRAATAPVVALFDAHVEFNVGWAEPVLTRIKENRKRIISPSFDNIKYDNFEI |
| | EEYPLAAQGFDWELWCRYLNPPKAWWKLENSTAPIRSPALIGCFIVDRQYFQEIGLLD |
| | EGMEVYGGENVELGIRVWQCGGSVEVLPCSRIAHIERAHKPYTEDLTAHVRRNALRVA |
| | EVWMDEFKSHVYMAWNIPQEDSGIDMGDITARKALRKQLQCKTFRWYLVSVYPEMRMY |
| | SDIIAYGVLQNSLKTDLCLDQGPDTENVPIMYTCHGMTPQNVYYTSSQQIHVGILSPT |
| | VDDDDNRCLVDVNSRPRLIECSYAKAKRMKLHWQFSQGGPIQNRKSKRCLKLQENSDL |
| | EFGFQLVLQKCSGQQGSITNVLRSLAS |

[0403] Sequence comparison of the above protean sequence yields the following sequence relationships shown in Table 16D.

TABLE 16B
Comparison of NOV16a against NOV16b and NOV16c.

| Protein | NOV16a Residues/ | Identities/Similarities |
|---|---|---|
| Sequence | Match Residues | for the Matched Region |
| NOV16b | 1 . . . 607 | 580/607 (95%) |
| | 1 . . . 607 | 580/607 (95%) |
| NOV16c | 1 . . . 607 | 580/607 (95%) |
| | 1 . . . 607 | 580/607 (95%) |

[0404] Further analysis of the NOV16a protein yielded the following properties shown in Table 16C.

TABLE 16C
Protein Sequence Properties NOV16a

| | |
|---|---|
| PSort | 0.6850 probability located in endoplasmic reticulum |
| analysis: | (membrane); 0.6400 probability located in plasma membrane; |
| | 0.4600 probability located in Golgi body; 0.1000 |
| | probability located in endoplasmic reticulum (lumen) |
| SignalP | Cleavage site between residues 44 and 45 |
| analysis: | |

[0405] A search of the NOV16a protein against the Geneseq database a proprietary database that contains sequences published in patents and patent publication yielded several homologous proteins shown in Table 16D.

TABLE 16D
Geneseq Results for NOV16a

| | | NOV16a | Identities/ | |
|---|---|---|---|---|
| | Protein/ | Residues/ | Similarities for | |
| Geneseq | Organism/Length | Match | the Matched | Expect |
| Identifier | [Patent #, Date] | Residues | Region | Value |
| AAM41675 | Human poly- | 105 . . . 603 | 283/503 (56%) | e−169 |
| | peptide SEQ ID | 65 . . . 560 | 368/503 (72%) | |
| | NO 6606—Homo | | | |
| | sapiens, 560 aa. | | | |
| | [WO200153312- | | | |
| | A1, 26 JUL. | | | |
| | 2001] | | | |
| ABB04283 | Human N-acetyl- | 351 . . . 607 | 252/257 (98%) | e−149 |
| | galactosamine | 1 . . . 257 | 254/257 (98%) | |
| | transferase-28 | | | |
| | polypeptide— | | | |
| | Homo sapiens, | | | |
| | 257 aa. | | | |
| | [WO200190369- | | | |
| | A1, 29 NOV. | | | |
| | 2001] | | | |
| AAM40398 | Human poly- | 236 . . . 603 | 201/371 (54%) | e−124 |
| | peptide SEQ ID | 29 . . . 398 | 274/371 (73%) | |
| | NO 3543—Homo | | | |
| | sapiens, 402 aa. | | | |
| | [WO200153312- | | | |
| | A1, 26 JUL. | | | |
| | 2001] | | | |
| AAB40597 | Human ORFX | 360 . . . 553 | 187/195 (95%) | e−106 |
| | ORF361 poly- | 1 . . . 193 | 190/195 (96%) | |
| | peptide sequence | | | |
| | SEQ ID NO: | | | |
| | 722—Homo | | | |
| | sapiens, 193 aa. | | | |
| | [WO200058473- | | | |
| | A2, 5 OCT. | | | |
| | 2000] | | | |
| AAB41739 | Human ORFX | 174 . . . 441 | 171/269 (63%) | e−105 |
| | ORF1503 poly- | 1 . . . 266 | 216/269 (79%) | |
| | peptide sequence | | | |
| | SEQ ID NO: | | | |
| | 3006—Homo | | | |
| | sapiens, 266 aa. | | | |
| | [WO200058473- | | | |
| | A2, 5 OCT. | | | |
| | 2000] | | | |

[0406] In a BLAST search of public sequence databases, the NOV 16a protein was found to have homology to the proteins shown in the BLASTP data in Table 16E.

TABLE 16E
Public BLASTP Results for NOV16a

| | | NOV16a | Identities/ | |
|---|---|---|---|---|
| Protein | | Residues/ | Similarities for | |
| Accession | Protein/ | Match | the Matched | Expect |
| Number | Organism/Length | Residues | Portion | Value |
| Q9HCQ5 | UDP-GalNAc: | 57 . . . 603 | 292/552 (52%) | e−169 |
| | polypeptide N- | 58 . . . 599 | 390/552 (69%) | |
| | acetylgalactos- | | | |
| | aminyl- | | | |
| | transferase— | | | |
| | Homo sapiens | | | |
| | (Human), 603 aa. | | | |
| AAM62306 | Putative poly- | 105 . . . 603 | 283/503 (56%) | e−169 |
| | peptide N-acetyl- | 103 . . . 598 | 368/503 (72%) | |
| | galactosaminyl- | | | |
| | transferase— | | | |
| | Homo sapiens | | | |
| | (Human), 598 aa. | | | |
| Q9GM01 | UDP-GalNAc: | 70 . . . 603 | 287/540 (53%) | e−168 |
| | polypeptide N- | 72 . . . 602 | 385/540 (71%) | |
| | acetylgalactos- | | | |
| | aminyl- | | | |
| | transferase— | | | |
| | Macaca | | | |
| | fascicularis | | | |
| | (Crab eating | | | |
| | macaque) | | | |
| | (Cynomolgus | | | |
| | monkey), 606 aa. | | | |
| AAM62404 | Williams-Beuren | 105 . . . 603 | 285/503 (56%) | e−168 |
| | syndrome critical | 103 . . . 596 | 368/503 (72%) | |
| | region gene 17— | | | |
| | Mus musculus | | | |
| | (Mouse), 596 aa. | | | |
| Q9NY28 | UDP-N-acetyl- | 44 . . . 603 | 274/562 (48%) | e−159 |
| | alpha-D-galactos- | 80 . . . 629 | 380/562 (66%) | |
| | amine:poly- | | | |
| | peptide N-acetyl | | | |
| | galactosaminyl- | | | |
| | transferase 8— | | | |
| | Homo sapiens | | | |
| | (Human), 637 aa. | | | |

[0407] PFam analysis predicts that the NOV 16a protein contains tie domains shown in tie Table 16F

TABLE 16F
Domain Analysis of NOV16a

| Pfam | NOV16a | Identities/Similarities | Expect |
|---|---|---|---|
| Domain | Match Region | for the Matched Region | Value |
| Glycos_transf_2 | 157 . . . 345 | 42/192 (22%) | 1.4e−24 |
| | | 136/192 (71%) | |

### Example 17

[0408] The NOV17 clone was analyzed, and their nucleotide and encoded polypeptide sequences are shown in Table 17A.

TABLE 17A
NOV17 Sequence Analysis

| | |
|---|---|
| SEQ ID NO: 53 | 1132 bp |

| | |
|---|---|
| NOV17a, | GTTATGAAGTGCAAGGCTGCAGTTGCTTGGGAGGCTGGAAAGCCTCTCTCCATAGAGG |
| CG125169- | |
| 01 DNA | AGATAGAGGTGGCACCCCCAAAGGCTCATGAAGTTCGAATCAAGATCATTGCCACTGC |
| Sequence | |
| | GGTTTGCCACACCGACGCCTATACCCTGAGGGGAGCTGATCCTGAGGGTTGTTTTCCA |
| | GTGATCTTGGGACATGAAGGTGCCGGAATTGAGGAAAGTGTTGGCGAGGGAGTTACTA |
| | AGCTGAAGGCGGGTGACACTGTCATCCCACTTTACATCCCACAGTGTGGAGAATGCAA |
| | ATTTTGTCTATATCCTAAAACTAACCTTTGCCAGAAGATAAGAGTCACTCAAGGGAAA |
| | GGATTAATGCCAGATGGTACCAGCAGATTTACTTGCAAAGGAAAGACAATTTTGCGTT |
| | ACATGGGAACCAGCACATTTTCTGAATACACAGTTGTAGCTGATATCTCTGTTGCTAA |
| | AATAGATCCTTTAGCACCTTTGGATAAACTCTGCCTTCTAGGTTGTGGCATTTCAGCT |
| | GGTGATGGTGCTGCTGTGAACACTGCCAAGGTGGAACCTGGCTCTGTTTGTGCCGTCT |
| | TTGGTCTGGGAGGAGTTGGATTGGCAGTTATCAAGGGCTGTAAAGTGGCTGGTGCATC |
| | CCGGATCATTGGTGTGGACATCAATAAAGATAAATTTGCAAGGGCCAAAGAGTTTGGA |
| | GCCACTGAATGTATTAACCCTCAGGGTTTTAGTAAACCCATCCAGGAAGGGCTCATTG |
| | AGACGACTGATGGAGGAGTGGACTATTCCTTTGAATGTATTGGTAATGTGAAGGTCAT |
| | GAGAGCAGCACTTGAGGCTTATCACAAGGGCTGGGGAGTCAGCGTGGTGGTTGGAGTA |
| | GCTGCTTCAGGTGAAGAAATTGCCACTCGTCCATTCCAGCTGGTAACAGGTCGCACAT |
| | GGAAAGGAACTGCCTTTGGAGGATGGAAGAGTGTAGAAAGTGTCCCAAAGTTGGTGTC |
| | TGAATATATGTCCAAAAAAATAAAAGTTGATGAATTTGTGACTCACAATCTGTCTTTT |
| | GGTGAAATTAACAAAGCCTTTCAACTGATGCATTCTGGAAAGAGCATTCGAACTGTTG |
| | TAAAGATTTAATTCAAAAGAGAAAAATAAT |

| | |
|---|---|
| ORF Start: ATG at 4 | ORF Stop: TAA at 1111 |

| | | |
|---|---|---|
| SEQ ID NO: 54 | 369 aa | MW at 39154.1 kD |

| | |
|---|---|
| NOV17a, | MKCKAAVAWEAGKRLSIEEIEVAPPKAHEVRIKIIATAVCHTDAYTLRGADPEGCFPV |
| CG125169- | |
| 01 Protein | ILGHEGAGIEESVGEGVTKLKAGDTVIPLYIPQCGECKFCLYPKTNLCQKIRVTQGKG |
| Sequence | |
| | LMPDGTSRFTCKGKTILRYMGTSTFSEYTVVADISVAKIDPLAPLDKLCLLGCGISAG |
| | DGAAVNTAKVEPGSVCAVFGLGGVGLAVIKGCKVAGASRIIGVDINKDKFARAKEFGA |
| | TECINPQGFSKPIQEGLIETTDGGVDYSFECIGNVKVMRAALEAYHKGWGVSVVVGVA |
| | ASGEEIATRPFQLVTGRTWKGTAFGGWKSVESVPKLVSEYMSKKIKVDEFVTHNLSFG |
| | EINKAFQLMHSGKSIRTVVKI |

[0409] Further analysis of the NOV17a protein yielded the following properties shown in Table 17B.

TABLE 17B
Protein Sequence Properties NOV17a

| | |
|---|---|
| PSort | 0.7000 probability located in plasma membrane; 0.2000 |
| analysis: | probability located in endoplasmic reticulum (membrane); |
| | 0.1000 probability located in mitochondrial inner membrane; |
| | 0.0692 probability located in microbody (peroxisome) |
| SignalP | No Known Signal Sequence Predicted |
| analysis: | |

[0410] A search of the NOV17a protein against the Geneseq database, a proprietary database that contains sequences published in patents and patent publication, yielded several homologous proteins shown in Table 17C.

TABLE 17C
Geneseq Results for NOV17a

| | | NOV17a | Identities/ | |
|---|---|---|---|---|
| | Protein/ | Residues/ | Similarities for | |
| Geneseq | Organism/Length | Match | the Matched | Expect |
| Identifier | [Patent #, Date] | Residues | Region | Value |
| AAB43405 | Human cancer | 1 . . . 369 | 351/369 (95%) | 0.0 |
| | associated protein | 15 . . . 383 | 356/369 (96%) | |
| | sequence | | | |
| | SEQ ID NO: | | | |
| | 850—Homo | | | |
| | sapiens, 383 aa. | | | |
| | [WO200055350- | | | |
| | A1, 21 SEP. | | | |
| | 2000] | | | |
| ABB62511 | Drosophila | 3 . . . 368 | 258/368 (70%) | e−153 |
| | melanogaster | 11 . . . 378 | 301/368 (81%) | |
| | polypeptide SEQ | | | |
| | ID NO 14325— | | | |
| | Drosophila | | | |
| | melanogaster, | | | |
| | 379 aa. | | | |
| | [WO200171042- | | | |
| | A2, 27 SEP. | | | |
| | 2001] | | | |
| AAG45942 | Arabidopsis | 3 . . . 367 | 248/366 (67%) | e−144 |
| | thaliana protein | 10 . . . 375 | 291/366 (78%) | |
| | fragment SEQ ID | | | |
| | NO: 57741— | | | |
| | Arabidopsis | | | |
| | thaliana, 379 aa. | | | |
| | [EP1033405-A2, | | | |
| | 6 SEP. 2000] | | | |
| AAG45941 | Arabidopsis | 3 . . . 367 | 248/366 (67%) | e−144 |
| | thaliana protein | 26 . . . 391 | 291/366 (78%) | |
| | fragment SEQ ID | | | |
| | NO: 57740— | | | |
| | Arabidopsis | | | |
| | thaliana, 395 aa. | | | |
| | [EP1033405-A2, | | | |
| | 6 SEP. 2000] | | | |
| AAG16746 | Arabidopsis | 3 . . . 367 | 248/366 (67%) | e−144 |
| | thaliana protein | 10 . . . 375 | 291/366 (78%) | |
| | fragment SEQ ID | | | |
| | NO: 17509— | | | |
| | Arabidopsis | | | |
| | thaliana, 379 aa. | | | |
| | [EP1033405-A2, | | | |
| | 6 SEP. 2000] | | | |

[0411] In a BLAST search of public sequence databases, the NOV17a protein was found to have homology to the proteins shown in the BLAST data in Table 17D.

TABLE 17D
Public BLASTP Results for NOV17a

| | | NOV17a | Identities/ | |
|---|---|---|---|---|
| Protein | | Residues/ | Similarities for | |
| Accession | Protein/ | Match | the Matched | Expect |
| Number | Organism/Length | Residues | Portion | Value |
| CAC27318 | Sequence 53 | 1 . . . 369 | 353/369 (95%) | 0.0 |
| | from Patent | 6 . . . 374 | 357/369 (96%) | |
| | WO0102600— | | | |
| | Homo sapiens | | | |
| | (Human), 374 aa. | | | |
| P11766 | Alcohol | 1 . . . 369 | 353/369 (95%) | 0.0 |
| | dehydrogenase class | 5 . . . 373 | 357/369 (96%) | |
| | III chi chain | | | |
| | (EC 1.1.1.1) | | | |
| | (Glutathione- | | | |
| | dependent | | | |
| | formaldehyde | | | |
| | dehydrogenase) | | | |
| | (EC 1.2.1.1) | | | |
| | (FDH)—Homo | | | |
| | sapiens (Human), | | | |
| | 373 aa. | | | |
| P19854 | Alcohol | 1 . . . 369 | 338/369 (91%) | 0.0 |
| | dehydrogenase | 5 . . . 373 | 354/369 (95%) | |
| | class III chain | | | |
| | (EC 1.1.1.1) | | | |
| | (Glutathione- | | | |
| | dependent | | | |
| | formaldehyde | | | |
| | dehydrogenase) | | | |
| | (EC 1.2.1.1) (FDH) | | | |
| | (FALDH)—Equus | | | |
| | caballus (Horse), | | | |
| | 373 aa. | | | |
| O19053 | Alcohol | 1 . . . 369 | 337/369 (91%) | 0.0 |
| | dehydrogenase | 5 . . . 373 | 347/369 (93%) | |
| | class III chain | | | |
| | (EC 1.1.1.1) | | | |
| | (Glutathione- | | | |
| | dependent | | | |
| | formaldehyde | | | |
| | dehydrogenase) | | | |
| | (EC 1.2.1.1) (FDH) | | | |
| | (FALDH)— | | | |
| | Oryctolagus | | | |
| | cuniculus | | | |
| | (Rabbit), 373 aa. | | | |
| P12711 | Alcohol | 1 . . .369 | 337/369 (91%) | 0.0 |
| | dehydrogenase | 5 . . . 373 | 350/369 (94%) | |
| | class III (EC | | | |
| | 1.1.1.1) (Alcohol | | | |
| | dehydrogenase 2) | | | |
| | (Glutathione- | | | |
| | dependent | | | |
| | formaldehyde | | | |
| | dehydrogenase) | | | |
| | (EC 1.2.1.1) (FDH) | | | |
| | (FALDH) (Alcohol | | | |
| | dehydrogenase- | | | |
| | B2)—Rattus | | | |
| | norvegicus (Rat), | | | |
| | 373 aa. | | | |

[0412] PFam analysis predicts that the NOV17a protein contains the domains shown in the Table 17E.

TABLE 17E
Domain Analysis of NOV17a

| Pfam | NOV17a | Identities/Similarities | Expect |
|---|---|---|---|
| Domain | Match Region | for the Matched Region | Value |
| adh_zinc | 14 . . . 369 | 146/463 (32%) | 1.9e−138 |
| | | 324/463 (70%) | |

### Example 18

[0413] The NOV18 clone was analyzed, and the neucleoticle and encoded polypeptide sequences are shown in Table 18A.

TABLE 18A
NOV18 Sequence Analysis

| | |
|---|---|
| SEQ ID NO: 55 | 701 bp |

| | |
|---|---|
| NOV18a, | GCGGTGTATGTGCGGCAATAACATGTCAACCCCGCTGCCCACCATCGTGCCCGCCCCC |
| CG125197- | |
| 01 DNA | CGGAAGGCCACCACTGAGGTGATTTTCCTGCATGGATTGGGAGATACTGGGCACGGAT |
| Sequence | |
| | GGGCAGAAGCCTTTGCCGGTATCATAAGTTCACATATCAAATATATCTGCCCGCATGC |
| | GCCTGTTAGGCCTGTTACATTAAATATGAACATAGCTATGCCTTCATGGTTTGATATT |
| | ATTGGGCTTTCACCAGATTCACAGGAGGATGAATCTGGGATTAAACAGGCAGCACAAA |
| | ATATAAAAGCTTTGATTGATCAAGAAGTGAAGAATGGCATTCCTTCTAACAGAATTAT |
| | TTTGGGAGGGTTTTCTCAGGGAGGAGCTTTATCTTTATATACTGCCCTTACCACGCAC |
| | CAGAAACTGGCAGGTGTCACTGCACTCAATTGCTGGCTTCCACTTTGGGCTTCCTTTC |
| | CACAGGGTCCTATCGGTGGTGCTAATAGAGATATTTCTATTCTCCAGTGCCACGGGGA |
| | TTGTGACCCTTTGGTTCCCCTGATGTTTGGTTCTCTTACGGTTGAAAAACTAAAAACA |
| | TTGGTGAATCCAGCCAATGTGACCTTTAAAACCTATGAAGGTATGATGCACAGTTCGT |
| | GTCAACAGGAAATGATGAATGTCAAGCAATTCATTGATAAACTCCTACCTCCAATTGA |
| | TTGAC |

| | |
|---|---|
| ORF Start: ATG at 8 | ORF Stop: TGA at 698 |

| | | |
|---|---|---|
| SEQ ID NO: 56 | 230 aa | MW at 24848.5 kD |

| | |
|---|---|
| NOV18a, | MCGNNMSTPLPTIVPAPRKATTEVIFLHGLGDTGHGWAEAFAGIISSHIKYICPHAPV |
| CG125197- | |
| 01 Protein | RPVTLNMNIAMPSWFDIIGLSPDSQEDESGIKQAAQNIKALIDQEVKNGIPSNRIILG |
| Sequence | |
| | GFSQGGALSLYTALTTHQKLAGVTALNCWLPLWASFPQGPIGGANRDISILQCHGDCD |
| | PLVPLMFGSLTVEKLKTLVNPANVTFKTYEGMMHSSCQQEMMNVKQFIDKLLPPID |

[0414] Further analysis of the NOV18a protein yielded the following properties shown in Table 18IB.

TABLE 18B
Protein Sequence Properties NOV18a

| | |
|---|---|
| PSort | 0.6500 probability located in cytoplasm; 0.2605 probability |
| analysis: | located in lysosome (lumen); 0.1000 probability located in |
| | mitochondrial matrix space; 0.0000 probability located in |
| | endoplasmic reticulum (membrane) |
| SignalP | No Known Signal Sequence Predicted |
| analysis: | |

[0415] A search of the NOV18a protein against the Geneseq database, a proprietary database that contains sequences published in patents and patent publication, yielded several homologous proteins shown in Table 18C.

TABLE 18C
Geneseq Results for NOV18a

| | | NOV18a | | |
|---|---|---|---|---|
| | Protein/Organism/ | Residues/ | Identities/ | |
| Geneseq | Length [Patent #, | Match | Similarities for | Expect |
| Identifier | Date] | Residues | the Matched Region | Value |
| AAU85134 | Human lysophospholipase I #2-Homo | 1 . . . 230 | 219/230 (95%) | e−127 |
| | sapiens, 230 aa. [WO200210185-A1, | 1 . . . 230 | 223/230 (96%) | |
| | 7 Feb. 2002] | | | |
| AAU85132 | Human lysophospholipase I #1-Homo | 1 . . . 230 | 219/230 (95%) | e−127 |
| | sapiens, 230 aa. [WO200210185-A1, | 1 . . . 230 | 223/230 (96%) | |
| | 7 Feb. 2002] | | | |
| ABG07277 | Novel human diagnostic protein #7268- | 1 . . . 230 | 219/230 (95%) | e−127 |
| | Homo sapiens, 275 aa. [WO200175067- | 46 . . . 275 | 223/230 (96%) | |
| | A2, 11 Oct. 2001] | | | |
| ABG07277 | Novel human diagnostic protein #7268- | 1 . . . 230 | 219/230 (95%) | e−127 |
| | Homo sapiens, 275 aa. [WO200175067- | 46 . . . 275 | 223/230 (96%) | |
| | A2, 11 Oct. 2001] | | | |
| AAB53451 | Human colon cancer antigen protein | 1 . . . 230 | 219/230 (95%) | e−127 |
| | sequence SEQ ID NO: 991-Homo | 34 . . . 263 | 223/230 (96%) | |
| | sapiens, 263 aa. [WO200055351-A1, | | | |
| | 21 Sep. 2000] | | | |

[0416] In a BLAST search of public sequence databases, the NOV 18a protein was found to have homologs,y to the proteins shown in the BLASTP data in Table 18D.

TABLE 18D
Public BLASTP Results for NOV18a

| | | NOV18a | | |
|---|---|---|---|---|
| Protein | | Residues/ | Identities/ | |
| Accession | | Match | Similarities for | Expect |
| Number | Protein/Organism/Length | Residues | the Matched Portion | Value |
| O75608 | Lysophospholipase (Acyl-protein | 1 . . . 230 | 219/230 (95%) | e−127 |
| | thioesterase-1) (Lysophospholipase I)- | 1 . . . 230 | 223/230 (96%) | |
| | Homo sapiens (Human), 230 aa. | | | |
| O77821 | Calcium-independent phospholipase | 1 . . . 230 | 202/230 (87%) | e−119 |
| | A2 isoform 2-Oryctolagus cuniculus | 1 . . . 230 | 213/230 (91%) | |
| | (Rabbit), 230 aa. | | | |
| P70470 | LYSOPHOSPHOLIPASE-Rattus | 1 . . . 230 | 203/230 (88%) | e−118 |
| | norvegicus (Rat), 230 aa. | 1 . . . 230 | 213/230 (92%) | |
| O77820 | Calcium-independent phospholipase | 14 . . . 230 | 202/217 (93%) | e−116 |
| | A2 isoform 1-Oryctolagus cuniculus | 3 . . . 219 | 207/217 (95%) | |
| | (Rabbit), 219 aa (fragment). | | | |
| Q9UQF9 | Lysophospholipase isoform-Homo | 1 . . . 230 | 204/230 (88%) | e−114 |
| | sapiens (Human), 214 aa. | 1 . . . 214 | 207/230 (89%) | |

[0417] PFam analysis predicts that the NOV18a protein contains the domains shown in the Table 18E.

TABLE 18E
Domain Analysis of NOV18a

| | | Identities/ | |
|---|---|---|---|
| Pfam | NOV18a | Similarities for | Expect |
| Domain | Match Region | the Matched Region | Value |
| abhydrolase_2 | 10 . . . 226 | 123/236 (52%) | 1.3e−108 |
| | | 193/236 (82%) | |

### Example 19

[0418] The NOV19 clone was analyzed, and the nucleotide and encoded polypeptide sequences are shown in Table 19A.

TABLE 19A

NOV19 Sequence Analysis

| | |
|---|---|
| SEQ ID NO: 57 | 2475 bp |

| | |
|---|---|
| NOV19a, | ACTCACTATAGGGCTCGAGCGGAGCTGCTGGCTGGAGAGGAGGGTGGACGAAGCTCTC |
| CG 125215- | |
| 01 DNA | TCTAGAAAGACATCCTGAGAGGACTTGGCAGGCCTGAATATGCATTGGCTGCGAAAAG |
| Sequence | |
| | TTCAGGGACTTTGCACCCTGTGGGGTACTCAGATGTCCAGCCGCACTCTCTACATTAA |
| | TAGTAGGCAACTGGTGTCCCTGCAGTGGGGCCACCAGGAAGTGCCGGCCAAGTTTAAC |
| | TTTGCTAGTGATGTGTTGGATCACTGGGCTGACATGGAGAAGGCTGGCAAGCGACTCC |
| | CAAGCCCAGCCCTGTGGTGGGTGAATGGGAAGGGGAAGGAATTAATGTGGAATTTCAG |
| | AGAACTGAGTGAAAACAGCCAGCAGGCAGCCAACGTCCTCTCGGGAGCCTGTGGCCTG |
| | CAGCGTGGGGATCGTGTGGCAGTGGTGCTGCCCCGAGTGCCTGAGTGGTGGCTGGTGA |
| | TCCTGGGCTGCATTCGAGCAGGTCTCATCTTTATGCCTGGAACCATCCAGATGAAATC |
| | CACTGACATACTGTATAGGTTGCAGATGTCTAAGGCCAAGGCTATTGTTGCTGGGGAT |
| | GAAGTCATCCAAGAAGTGGACACAGTGGCATCTGAATGTCCTTCTCTGAGAATTAAGC |
| | TACTGGTGTCTGAGAAAAGCTGTGATGGGTGGCTGAACTTCAAGAAACTACTAAATGA |
| | GGCATCCACCACTCATCACTGTGTGGAGACTGGAAGCCAGGAAGCATCTGCCATCTAC |
| | TTCACTAGTGGGACCAGTGGTCTTCCCAAGATGGCAGAACATTCCTACTCGAGCCTGG |
| | GCCTCAAGGCCAAGATGGATGCTGGTTGGACAGGCCTGCAAGCCTCTGATATAATGTG |
| | GACCATATCAGACACAGGTTGGATACTGAACATCTTGGGCTCACTTTTGGAATCTTGG |
| | ACATTAGGAGCATGCACATTTGTTCATCTCTTGCCAAAGTTTGACCCACTGGTTATTC |
| | TAAAGACACTCTCCAGTTATCCAATCAAGAGTATGATGGGTGCCCCTATTGTTTACCG |
| | GATGTTGCTACAGCAGGATCTTTCCAGTTACAAGTTCCCCCATCTACAGAACTGCCTC |
| | GCTGGAGGGGAGTCCCTTCTTCCAGAAACTCTGGAGAACTGGAGGGCCCAGACAGGAC |
| | TGGACATCCGAGAATTCTATGGCCAGACAGAAACGGGATTAACTTGCATGGTTTCCAA |
| | GACAATGAAAATCAAACCAGGATACATGGGAACGGCTGCTTCCTGTTATGATGTACAG |
| | GTTATAGATGATAAGGGCAACGTCCTGCCCCCCGGCACAGAAGGAGACATTGGCATCA |
| | GGGTCAAACCCATCAGGCCTATAGGCATCTTCTCTGGCTATGTGGAAAATCCCGACAA |
| | GACAGCAGCCAACATTCGAGGAGACTTTTGGCTCCTTGGAGACCGGGGAATCAAAGAT |
| | GAAGATGGGTATTTCCAGTTTATGGGACGGGCAGATGATATCATTAACTCCAGCGGGT |
| | ACCGGATTGGACCCTCGGAGGTAGAGAATGCACTGATGAAGCACCCTGCTGTGGTTGA |
| | GACGGCTGTGATCAGCAGCCCAGACCCCGTCCGAGGAGAGGTGGTGAAGGCATTTGTG |
| | ATACTGGCCTCGCAGTTCCTATCCCATGACCCAGAACAGCTCACCAAGGAGCTGCAGC |
| | AGCATGTGAAGTCAGTGACAGCCCCATACAAGTACCCAAGAAAGATAGAGTTTGTCTT |
| | GAACCTGCCCAAGACTGTCACAGGGAAAATTCAACGAACCAAACTTCGAGACAAGGAG |
| | TGGAAGATGTCCGGAAAAGCCCGTGCGCAGTGAGACATCTAGGAGACATTCATTTGGA |
| | TTCCCCTCTTCTTTCTCTTTCTTTTCCCTTTGGGCCCTTGGCCTTACTATGATGATAT |
| | GAGATTCTTTATGAAAGAACATGAATGTAAGTTTGTCTTGCCCTGGTTATTAGCCTTG |
| | GTTATTAGCACAAAACTTTACCATGTTAGATGTTGAAAGAAGAAAGGGAAGGAATGAG |
| | AGAGAGTGAAAAGGAGAGGGTAACAGAAAAAAAGGAAAGAAAAGTAAGTCAGGGAAAT |
| | ATTAAAAACTGCAAGGGAAAGCAATTGAAAAAGAAATAAAGTAGGGAAAGAAGGAGAG |
| | AGGAAGCAAGGGAAGGAGGAAGAAAGGAAAGAGGAGATGAAAGGGGGAGAAAAGATAG |
| | AAGAAAAATAATTGAAGGGAGAATCAGAAAAATAAAGAGAAGAAAGGAAAGAAATAAA |
| | GAGAGAAAGAGAAAGAAGAAAGAGCAAAAGAACACAAGAAAGAAAGAGAGGGAGAAAG |
| | AGAGGGAGAAAGGGAGAGAAAAAAATTGTAAAAATAAAAATAGTAAAAGAAACTGATA |
| | ACGAAAAGTAATGGAAGACAGGAAGAAAAGATAGAAGAAAAATAATTGAAGGGAGAAT |
| | CAGAAAAATAAAGAGAAGAAAGGAAAGAAATAAAGAGAG |

| | |
|---|---|
| ORF Start: ATG at 98 | ORF Stop: TGA at 1829 |

| | | |
|---|---|---|
| SEQ ID NO: 58 | 577 aa | MW at 64224.5 kD |

| | |
|---|---|
| NOV19a, | MHWLRKVQGLCTLWGTQMSSRTLYINSRQLVSLQWGHQEVPAKFNFASDVLDHWADME |
| CG125215- | |
| 01 Protein | KAGKRLPSPALWWVNGKGKELMWNFRELSENSQQAANVLSGACGLQRGDRVAVVLPRV |
| Sequence | |
| | PEWWLVILGCIRAGLIFMPGTIQMKSTDILYRLQMSKAKAIVAGDEVIQEVDTVASEC |
| | PSLRIKLLVSEKSCDGWLNFKKLLNEASTTHHCVETGSQEASAIYFTSGTSGLPKMAE |
| | HSYSSLGLKAKMDAGWTGLQASDIMWTISDTGWILNILGSLLESWTLGACTFVHLLPK |
| | FDPLVILKTLSSYPIKSMMGAPIVYRMLLQQDLSSYKFPHLQNCLAGGESLLPETLEN |
| | WRAQTGLDIREFYGQTETGLTCMVSKTMKIKPGYMGTAASCYDVQVIDDKGNVLPPGT |
| | EGDTGIRVKPIRPIGIFSGYVENPDKTAANIRGDFWLLGDRGIKDEDGYFQFMGRADD |
| | IINSSGYRIGPSEVENALMKHPAVVETAVISSPDPVRGEVVKAFVILASQFLSHDPEQ |
| | LTKELQQHVKSVTAPYKYPRKIEFVLNLPKTVTGKIQRTKLRDKEWKMSGKARAQ |

| | |
|---|---|
| SEQ ID NO: 59 | 1878 bp |

| | |
|---|---|
| NOV19b, | AGGGTGGACGAAGCTCTCTCTAGAAAGACATCCTGAGAGGACTTCGCAGGCCTGAACA |
| CG125215- | |
| 02 DNA | TGCATTGGCTGCGAAAAGTTCAGGGACTTTGCACCCTGTGGGGTACTCAGATGTCCAG |
| Sequence | |
| | CCGCACTCTCTACATTAATAGTAGGCAACTGGTGTCCCTGCAGTGGGGCCACCAGGAA |
| | GTTCCGGCCAAGTTTAACTTTGCTAGTGATGTGTTGGATCACTGGGCTGACATGGAGA |
| | AGGCTGGCAAGCGACTCCCAAGCCCAGCCCTGTGGTGGGTGAATGGGAAGGGGAAGGA |
| | ATTAATGTGGAATTTCAGAGAACTGAGTGAAAACAGCCGGCAGGCAGCCAACGTCCTC |
| | TCGGGAGCCTGTGGCCTGCAGCGTGGGGATCGTGTGGCAGTGATGCTGCCCCGAGTGC |
| | CTGAGTGGTGGCTGGTGATCCTGGGCTGCATTCGAGCAGGTCTCATCTTTATGCCTGG |
| | AACCATCCAGATGAAATCCACTGACATACTGTATAGGTTGCAGATGTCTAAGGCCAAG |
| | GCTATTGTTGCTGGGGATGAAGTCATCCAAGAAGTGGACACAGTGGCATCTGAATGTC |
| | CTTCTCTGAGAATTAAGCTACTGGTGTCTGAGAAAAGCTGCGATGGGTGGCTGAACTT |
| | CAAGAAACTACTAAATGAGGCATCCACCACTCATCACTGTGTGGAGACTGGAAGCCAG |
| | GAAGCATCTGCCATCTACTTCACTAGTGGGACCAGTGGTCTTCCCAAGATGGCAGAAC |
| | ATTCCTACTCGAGCCTGGGCCTCAAGGCCAAGATGGATGCTGGTTGGACAGGCCTGCA |
| | AGCCTCTGATATAATGTGGACCATATCAGACACAGGTTGGATACTGAACATCTTGGGC |
| | TCACTTTTGGAATCTTGGACATTAGGAGCATGCACATTTGTTCATCTCTTGCCAAAGT |
| | TTGACCCACTGGTTATTCTAAAGACACTCTCCAGTTATCCAATCAAGAGTATGATGGG |
| | TGCCCCTATTGTTTACCGGATGTTGCTACAGCAGGATCTTTCCAGTTACAAGTTCCCC |
| | CATCTACAGAACTGCCTCGCTGGAGGGGAGTCCCTTCTTCCAGAAACTCTGGAGAACT |
| | GGAGGGCCCAGACAGGACTGGACATCCGAGAATTCTATGGCCAGACAGAAACGGGATT |
| | AACTTGCATGGTTTCCAAGACAATGAAAATCAAACCAGGATACATGGGAACGGCTGCT |
| | TCCTGTTATGATGTACAGGTTATAGATGATAAGGGCAACGTCCTGCCCCCCGGCACAG |
| | AAGGAGACATTGGCATCAGGGTCAAACCCATCAGGCCTATAGGCATCTTCTCTGGCTA |
| | TGTGGAAAATCCCGACAAGACAGCAGCCAACATTCGAGGAGACTTTTGGCTCCTTGGA |
| | GACCGGGGAATCAAAGATGAAGATGGGTATTTCCAGTTTATGGGACGGGCAGATGATA |
| | TCATTAACTCCAGCGGGTACCGGATTGGACCCTCGGAGGTAGAGAATGCACTGATGAA |
| | GCACCCTGCTGTGGTTGAGACGGCTGTGATCAGCAGCCCAGACCCCGTCCGAGGAGAG |
| | GTGGTGAAGGCATTTGTGATACTGGCCTCGCAGTTCCTATCCCATGACCCAGAACAGC |
| | TCACCAAGGAGCTGCAGCAGCATGTGAAGTCAGTGACAGCCCCATACAAGTACCCAAG |
| | AAAGATAGAGTTTGTCTTGAACCTGCCCAAGACTGTCACAGGGAAAATTCAACGAACC |
| | AAACTTCGAGACAAGGAGTGGAAGATGTCCGGAAAAGCCCGTGCGCAGTGAGGCGTCT |
| | AGGAGACATTCATTTGGATTCCCCTCTTCTTTCTCTTTCTTTTCCCTTTGGGCCCTTA |
| | GCCTTACTATGATGATATGAGA |

| | |
|---|---|
| ORF Start: ATG at 58 | ORF Stop: TGA at 1789 |

| | | |
|---|---|---|
| SEQ ID NO: 60 | 577 aa | MW at 64284.7 kD |

| | |
|---|---|
| NOV19b, | MHWLRKVQGLCTLWGTQMSSRTLYINSRQLVSLQWGHQEVPAKFNFASDVLDHWADME |
| CG125215- | |
| 02 Protein | KAGKRLPSPALWWVNGKGKELMWNFRELSENSRQAANVLSGACGLQRGDRVAVMLPRV |
| Sequence | |
| | PEWWLVILGCIRAGLIFMPGTIQMKSTDILYRLQMSKAKAIVAGDEVIQEVDTVASEC |
| | PSLRIKLLVSEKSCDGWLNFKKLLNEASTTHHCVETGSQEASAIYFTSGTSGLPKMAE |
| | HSYSSLGLKAKMDAGWTGLQASDIMWTISDTGWILNILGSLLESWTLGACTFVHLLPK |
| | FDPLVILKTLSSYPIKSMMGAPIVYRMLLQQDLSSYKFPHLQNCLAGGESLLPETLEN |
| | WRAQTGLDIREFYGQTETGLTCMVSKTMKIKPGYMGTAASCYDVQVIDDKGNVLPPGT |
| | EGDIGIRVKPIRPIGIFSGYVENPDKTAANIRGDFWLLGDRGIKDEDGYFQFMGRADD |
| | IINSSGYRIGPSEVENALMKHPAVVETAVISSPDPVRGEVVKAFVILASQFLSHDPEQ |
| | LTKELQQHVKSVTAPYKYPRKIEFVLNLPKTVTGKIQRTKLRDKEWKMSGKARAQ |

[0419] Sequence comparison of the above protein sequences yields the following sequence relationships shown in Table 19B.

TABLE 19B
Comparison of NOV19a against NOV19b.

| | | Identities/ |
|---|---|---|
| Protein | NOV19a Residues/ | Similarities for |
| Sequence | Match Residues | the Matched Region |
| NOV19b | 1 . . . 577 | 575/577 (99%) |
| | 1 . . . 577 | 577/577 (99%) |

[0420] Further analysis of the NOV19a protein yielded the following properties shown in Table 19C.

TABLE 19C
Protein Sequence Properties NOV19a

| | |
|---|---|
| PSort | 0.6000 probability located in endoplasmic reticulum |
| analysis: | (membrane); 0.3686 probability located in microbody |
| | (peroxisome); 0.2058 probability located in mitochondrial |
| | inner membrane; 0.1000 probability located in plasma |
| | membrane |
| SignalP | Cleavage site between residues 20 and 21 |
| analysis: | |

[0421] A search of the NOV19a protein against the Geneses database, a proprietary database that contains sequences published in patents and patent publication, yielded several homologous proteins shown in Table 19D.

TABLE 19D
Geneseq Results for NOV19a

| | | NOV19a | | |
|---|---|---|---|---|
| | Protein/Organism/ | Residues/ | Identities/ | |
| Geneseq | Length [Patent #, | Match | Similarities for | Expect |
| Identifier | Date] | Residues | the Matched Region | Value |
| AAB43245 | Human ORFX ORF3009 polypeptide | 41 . . . 577 | 534/537 (99%) | 0.0 |
| | sequence SEQ ID NO: 6018-Homo | 1 . . . 537 | 536/537 (99%) | |
| | sapiens, 537 aa. [WO200058473-A2, | | | |
| | 5 Oct. 2000] | | | |
| AAM41894 | Human polypeptide SEQ ID NO 6825- | 246 . . . 574 | 316/329 (96%) | 0.0 |
| | Homo sapiens, 390 aa. [WO200153312- | 2 . . . 330 | 321/329 (97%) | |
| | A1, 26 Jul. 2001] | | | |
| AAU23625 | Novel human enzyme polypeptide | 263 . . . 577 | 307/315 (97%) | e−179 |
| | #711-Homo sapiens, 315 aa. | 1 . . . 315 | 307/315 (97%) | |
| | [WO200155301-A2, 2 Aug. 2001] | | | |
| AAU23060 | Novel human enzyme polypeptide | 250 . . . 577 | 310/337 (91%) | e−179 |
| | #146-Homo sapiens, 342 aa. | 6 . . . 342 | 313/337 (91%) | |
| | [WO200155301-A2, 2 Aug. 2001] | | | |
| ABB53263 | Human polypeptide #3-Homo sapiens, | 38 . . . 560 | 235/528 (44%) | e−126 |
| | 583 aa. [WO200181363-A1, | 43 . . . 567 | 334/528 (62%) | |
| | 1 Nov. 2001] | | | |

[0422] In a BLAST search of public sequence databases, the NOV19a protein was found to have homology to the proteins shown in the BLAST data in Table 19E.

TABLE 19E
Public BLASTP Results for NOV19a

| | | NOV19a | | |
|---|---|---|---|---|
| Protein | | Residues/ | Identities/ | |
| Accession | | Match | Similarities for | Expect |
| Number | Protein/Organism/Length | Residues | the Matched Portion | Value |
| O70490 | Kidney-specific protein-Rattus | 1 . . . 572 | 445/572 (77%) | 0.0 |
| | norvegicus (Rat), 572 aa. | 1 . . . 572 | 507/572 (87%) | |
| AAH31140 | Hypothetical 64.3 kDa protein-Mus | 1 . . . 574 | 437/575 (76%) | 0.0 |
| | musculus (Mouse), 575 aa. | 1 . . . 575 | 502/575 (87%) | |
| Q96LX4 | CDNA FLJ33088 fis, clone | 1 . . . 574 | 437/575 (76%) | 0.0 |
| | TRACH2000496, highly similar to | 1 . . . 575 | 501/575 (87%) | |
| | Rattus norvegicus kidney-specific | | | |
| | protein (KS) mRNA-Homo sapiens | | | |
| | (Human), 575 aa. | | | |
| Q9TVBS | Xenobiotic/medium-chain fatty | 4 . . . 568 | 330/575 (57%) | 0.0 |
| | acid: CoA ligase form XL-III precursor- | 1 . . . 574 | 428/575 (74%) | |
| | Bos taurus (Bovine), 577 aa. | | | |
| Q9BEA2 | Lipoate-activating enzyme precursor- | 4 . . . 568 | 329/575 (57%) | 0.0 |
| | Bos taurus (Bovine), 577 aa. | 1 . . . 574 | 427/575 (74%) | |

[0423] PFam analysis predicts that the NOV19a protein contains the domains shown in the Table 19F.

TABLE 19F
Domain Analysis of NOV19a

| | | Identities/ | |
|---|---|---|---|
| Pfam | | Similarities for | Expect |
| Domain | NOV19a Match Region | the Matched Region | Value |
| AMP-binding | 82 . . . 493 | 108/421 (26%) | 2.1e−90 |
| | | 287/421 (68%) | |

### Example 20

[0424] The NOV20 clone was analyzed, and the nucleotide and encoded polypeptide sequences are shown in Table 20A.

TABLE 20A
NOV20 Sequence Analysis

| | |
|---|---|
| SEQ ID NO: 61 | 3162 bp |

| | |
|---|---|
| NOV20a, | GAATNTCGCCCTTACACGTAGAGGAGAGAAAAGCGACCAAGATAAAAGTGGACAGAAG |
| CG125332- | |
| 02 DNA | AATAAGCGAGACTTTTTATCCATGAAACAGTCTCCTGCCCTCGCTCCGGAAGAGCGCT |
| Sequence | |
| | GCCGCAGAGCCGGGTCCCCAAAGCCGGTCTTGAGAGCTGATGACAATAACATGGGCAA |
| | TGGCTGCTCTCAGAAGCTGGCGACTGCTAACCTCCTCCGGTTCCTATTGCTGGTCCTG |
| | ATTCCATGTATCTGTGCTCTCGTTCTCTTGCTGGTGATCCTGCTTTCCTATGTTGGAA |
| | CATTACAAAAGGTCTATTTTAAATCAAATGGGAGTGAACCTTTGGTCACTGATGGTGA |
| | AATCCAAGGGTCCGATGTTATTCTTACAAATACAATTTATAACCAGAGCACTGTGGTG |
| | TCTACTGCACATCCCGACCAACACGTTCCAGCCTGGACTACGGATGCTTCTCTCCCAG |
| | GGGACCAAAGTCACAGGAATACAAGTGCCTGTATGAACATCACCCACAGCCAGTGTCA |
| | GATGCTGCCCTACCACGCCACGCTGACACCTCTCCTCTCAGTTGTCAGAAACATGGAA |
| | ATGGAAAAGTTCCTCAAGTTTTTCACATATCTCCATCGCCTCAGTTGCTATCAACATA |
| | TCATGCTGTTTGGCTGTACCCTCGCCTTCCCTGAGTGCATCATTGATGGCGATGACAG |
| | TCATGGACTCCTGCCCTGTAGGTCCTTCTGTGAGGCTGCAAAAGAAGGCTGTGAATCA |
| | GTCCTGGGGATGGTGAATTACTCCTGGCCGGATTTCCTCAGATGCTCCCAGTTTAGAA |
| | ACCAAACTGAAAGCAGCAATGTCAGCAGAATTTGCTTCTCACCTCAGCAGGAAAACGG |
| | AAAGCAATTGCTCTGTGGAAGGGGTGAGAACTTTCTGTGTGCCAGTGGAATCTGCATC |
| | CCCGGGAAACTGCAATGTAATGGCTACAACGACTGTGACGACTGGAGTGACGAGGCTC |
| | ATTGCAACTGCAGCGAGAATCTGTTTCACTGTCACACAGGCAAGTGCCTTAATTACAG |
| | CCTTGTGTGTGATGGATATGATGACTGTGGGGATTTGAGTGATGAGCAAAACTGTGAT |
| | TGCAATCCCACAACAGAGCATCGCTGCGGGGACGGGCGCTGCATCGCCATGGAGTGGG |
| | TGTGTGATGGTGACCACGACTGTGTGGATAAGTCCGACGAGGTCAACTGCTCCTGTCA |
| | CAGCCAGGGTCTGGTGGAATGCAGAAATGGACAATGTATCCCCAGCACGTTTCAATGT |
| | GATGGTGACGAGGACTGCAAGGATGGGAGTGATGAGGAGAACTGCAGCGTCATTCAGA |
| | CTTCATGTCAAGAAGGACACCAAAGATGCCTCTACAATCCCTGCCTTGATTCATGTGG |
| | TGGTAGCTCTCTCTGTGACCCGAACAACAGTCTGAATAACTGTAGTCAATGTGAACCA |
| | ATTACATTGGAACTCTGCATGAATTTGCCCTACAACAGTACAAGTTATCCAAATTATT |
| | TTGGCCACAGGACTCAAAAGGAAGCATCCATCAGCTGGGAGTCTTCTCTTTTCCCTGC |
| | ACTTGTTCAAACCAACTGTTATAAATACCTCATGTTCTTTTCTTGCACCATTTTGGTA |
| | CCAAAATGTGATGTGAATACAGGCGAGCATATCCCTCCTTGCAGGGCATTGTGTGAAC |
| | ACTCTAAAGAACGCTGTGAGTCTGTTCTTGGGATTGTGGGCCTACAGTGGCCTGAAGA |
| | CACAGATTGCAGTCAATTTCCAGAGGAAAATTCAGACAATCAAACCTGCCTGATGCCT |
| | GATGAATATGTGGAAGGTTGTAAAGAGAGAGATCTTTGGGAATGTCCATCCAATAAAC |
| | AATGTTTGAAGCACACAGTGATCTGCGATGGGTTCCCAGACTGCCCTGATTACATGGA |
| | CGAGAAAAACTGCTCATTTTGCCAAGATGATGAGCTGGAATGTGCAAACCATGCGTGT |
| | GTGTCACGTGACCTGTGGTGTGATGGTGAAGCCGACTGCTCAGACAGTTCAGATGAAT |
| | GGGACTGTGTGACCCTCTCTATAAATGTGAACTCCTCTTCCTTTCTGATGGTTCACAG |
| | AGCTGCCACAGAACACCATGTGTGTGCAGATGGCTGGCAGGAGATATTGAGTCAGCTG |
| | GCCTGCAAGCAGATGGGTTTAGGAGAACCATCTGTGACCAAATTGATACAGGAACAGG |
| | AGAAAGAGCCGCGGTGGCTGACATTACACTCCAACTGGGAGAGCCTCAATGGGACCAC |
| | TTTACATGAACTTCTAGTAAATGGGCAGTCTTGTGAGAGCAGAAGTAAAATTTCTCTT |
| | CTGTGTACTAAACAAGACTGTGGGCGCCGCCCTGCTGCCCGAATGAACAAAAGGATCC |
| | TTGGAGGTCGGACGAGTCGCCCTGGAAGGTGGCCATGGCAGTGTTCTCTGCAGAGTGA |
| | ACCCAGTGGACATATCTGTGGCTGTGTCCTCATTGCCAAGAAGTGGGTTCTGACAGTT |
| | GCCCACTGCTTCGAGGGGAGAGAGAATGCTGCAGTTTGGAAAGTGGTGCTTGGCATCA |
| | ACAATCTAGACCATCCATCAGTGTTCATGCAGACACGCTTTGTGAAGACCATCATCCT |
| | GCATCCCCGCTACAGTCGAGCAGTGGTGGACTATGACATCAGCATCGTTGGGCTGAGT |
| | GAAGACATCAGTGAGACTGGCTACGTCCGGCCTGTCTGCTTGCCCAACCCGGAGCAGT |
| | GGCTAGAGCCTGACACGTACTGCTATATCACAGGCTGGGGCCACATGGGCAATAAAAT |
| | GCCATTTAAGCTGCAAGAGGGAGAGGTCCGCATTATTTCTCTGGAACATTGTCAGTCC |
| | TACTTTGACATGAAGACCATCACCACTCGGATGATATGTGCTGGCTATGAGTCTGGCA |
| | CAGTTGATTCATGCATGGGTGACAGCGGTGGGCCTCTTGTTTGTGAGAAGCCTGGAGG |
| | ACGGTGGACATTATTTGGATTAACTTCATGGGGCTCCGTCTGCTTTTCCAAAGTCCTG |
| | GGGCCTGGCGTTTATAGTAATGTGTCATATTTCGTCGAATGGATTAAAAGACAGATTT |
| | ACATCCAGACCTTTCTCCTAAACTAATTATAAGGATGATCAGAGACTTTTGCCAGCTA |
| | CACTAAAAGAAAATGGCCTTCTTGACTGTG |

| | |
|---|---|
| ORF Start: ATG at 80 | ORF Slop: TAA at 3098 |

| | | |
|---|---|---|
| SEQ ID NO: 62 | 1006 aa | MW at 112463.8 kD |

| | |
|---|---|
| NOV20a, | MKQSPALAPEERCRRAGSPKPVLRADDNNMGNGCSQKLATANLLRFLLLVLIPCICAL |
| CG125332- | |
| 02 Protein | VLLLVILLSYVGTLQKVYFKSNGSEPLVTDGEIQGSDVILTNTIYNQSTVVSTAHPDQ |
| Sequence | |
| | HVPAWTTDASLPGDQSHRNTSACMNITHSQCQMLPYHATLTPLLSVVRNMEMEKFLKF |
| | FTYLHRLSCYQHIMLFGCTLAFPECIIDGDDSHGLLPCRSFCEAAKEGCESVLGMVNY |
| | SWPDFLRCSQFRNQTESSNVSRICFSPQQENGKQLLCGRGENFLCASGICIPGKLQCN |
| | GYNDCDDWSDEAHCNCSENLFHCHTGKCLNYSLVCDGYDDCGDLSDEQNCDCNPTTEH |
| | RCGDGRCIAMEWVCDGDHDCVDKSDEVNCSCHSQGLVECRNGQCIPSTFQCDGDEDCK |
| | DGSDEENCSVIQTSCQEGDQRCLYNPCLDSCGGSSLCDPNNSLNNCSQCEPITLELCM |
| | NLPYNSTSYPNYFGHRTQKEASISWESSLFPALVQTNCYKYLMFFSCTILVPKCDVNT |
| | GEHIPPCRALCEHSKERCESVLGIVGLQWPEDTDCSQFPEENSDNQTCLMPDEYVEGC |
| | KERDLWECPSNKQCLKHTVICDGFPDCPDYMDEKNCSFCQDDELECANHACVSRDLWC |
| | DGEADCSDSSDEWDCVTLSTNVNSSSFLMVHRAATEHHVCADGWQEILSQLACKQMGL |
| | GEPSVTKLIQEQEKERRWLTLHSNWESLNGTTLHELLVNGQSCESRSKISLLCTKQDC |
| | GRRPAARMNKRILGGRTSRPGRWPWQCSLQSEPSGHICGCVLIAKKWVLTVAHCFEGR |
| | ENAAVWKVVLGINNLDHPSVFMQTRFVKTIILHPRYSRAVVDYDISIVGLSEDISETG |
| | YVRPVCLPNPEQWLEPDTYCYITGWGHMGNKMPFKLQEGEVRIISLEHCQSYFDMKTI |
| | TTRMICAGYESGTVDSCMGDSGGPLVCEKPGGRWTLFGLTSWGSVCFSKVLGPGVYSN |
| | VSYFVEWIKRQIYIQTFLLN |

[0425] Further analysis of the NOV20a protein yielded the following properties shown in Table 20B.

TABLE 20B
Protein Sequence Properties NOV20a

| | |
|---|---|
| PSort | 0.9000 probability located in Golgi body; 0.7900 probability |
| analysis: | located in plasma membrane; 0.2000 probability located in |
| | endoplasmic reticulum (membrane); 0.1000 probability |
| | located in mitochondrial inner membrane |
| SignalP | Cleavage site between residues 68 and 69 |
| analysis: | |

[0426] A search of the NOV20a protein against the Geneseq database, a proprietary database that contains sequences published in patents and patent publication, yielded several homologous proteins shown in Table 20C.

TABLE 20C
Geneseq Results for NOV20a

| | | NOV20a | | |
|---|---|---|---|---|
| | Protein/Organism/ | Residues/ | Identities | |
| Geneseq | Length [Patent #, | Match | Similarities for | Expect |
| Identifier | Date] | Residues | the Matched Region | Value |
| ABB11975 | Human corin homologue, SEQ ID | 1 . . . 1006 | 1004/1042 (96%) | 0.0 |
| | NO: 2345-Homo sapiens, 1076 aa. | 35 . . . 1076 | 1004/1042 (96%) | |
| | [WO200157188-A2, 9 Aug. 2001] | | | |
| AAE06939 | Human corin protein-Homo sapiens, | 1 . . . 1006 | 1003/1042 (96%) | 0.0 |
| | 1042 aa. [WO200157194-A2, | 1 . . . 1042 | 1003/1042 (96%) | |
| | 9 Aug. 2001] | | | |
| AAY44426 | Human serine protease, Corin-Homo | 1 . . . 1006 | 1003/1042 (96%) | 0.0 |
| | sapiens, 1042 aa. [WO9964608-A1, | 1 . . . 1042 | 1003/1042 (96%) | |
| | 16 Dec. 1999] | | | |
| AAY44427 | Mouse Serine protease, Corin-Mus | 13 . . . 1004 | 820/1029 (79%) | 0.0 |
| | musculus, 1113 aa. [WO9964608-A1, | 81 . . . 1107 | 890/1029 (85%) | |
| | 16 Dec. 1999] | | | |
| AAW46917 | Amino acid sequence of a novel | 656 . . . 1006 | 348/351 (99%) | 0.0 |
| | human kallikrein-Homo sapiens, | 6 . . . 356 | 348/351 (99%) | |
| | 356 aa. [WO9803665-A1, | | | |
| | 29 Jan. 1998] | | | |

[0427] In a BLAST search of public sequence databases, the NOV20a protein was found to have homology to the proteins shown in the BLASTP data in Table 20D.

TABLE 20D
Public BLASTP Results for NOV20a

| | | NOV20a | | |
|---|---|---|---|---|
| Protein | | Residues/ | Identities/ | |
| Accession | | Match | Similarities for | Expect |
| Number | Protein/Organism/Length | Residues | the Matched Portion | Value |
| Q9Y5Q5 | Atrial natriuteric peptide-converting | 1 . . . 1006 | 1003/1042 (96%) | 0.0 |
| | enzyme (EC 3.4.21.-) (pro-ANP- | 1 . . . 1042 | 1003/1042 (96%) | |
| | converting enzyme) (Corin) (Heart | | | |
| | specific serine proteinase ATC2)-Homo | | | |
| | sapiens (Human), 1042 aa. | | | |
| Q9Z319 | Atrial natriuteric peptide-converting | 13 . . . 1004 | 817/1029 (79%) | 0.0 |
| | enzyme (EC 3.4.21.-) (pro-ANP- | 81 . . . 1107 | 887/1029 (85%) | |
| | converting enzyme) (Corin) (Low density | | | |
| | lipoprotein receptor related protein 4)- | | | |
| | Mus musculus (Mouse), 1113 aa. | | | |
| Q9V4N6 | CG2105 protein-Drosophila | 455 . . . 998 | 191/575 (33%) | 9e−85 |
| | melanogaster (Fruit fly), 1379 aa. | 761 . . . 1329 | 286/575 (49%) | |
| Q95LS5 | Hypothetical 14.8 kDa protein-Macaca | 140 . . . 268 | 122/129 (94%) | 2e−69 |
| | fascicularis (Crab eating macaque) | 1 . . . 129 | 126/129 (97%) | |
| | (Cynomolgus monkey), 129 aa. | | | |
| P98072 | Enteropeptidase precursor (EC 3.4.21.9) | 619 . . . 995 | 137/387 (35%) | 2e−61 |
| | (Enterokinase)-Bos taurus (Bovine). | 659 . . . 1031 | 206/387 (52%) | |
| | 1035 aa. | | | |

[0428] PFam analysis predicts that the NOV20a protein contains the domains shown in the Table 20E.

TABLE 20E
Domain Analysis of NOV20a

| | | Identities/ | |
|---|---|---|---|
| Pfam | | Similarities for | Expect |
| Domain | NOV20a Match Region | the Matched Region | Value |
| Fz | 129 . . . 257 | 42/153 (27%) | 6.9e−39 |
| | | 105/153 (69%) | |
| ldl_recept_a | 267 . . . 304 | 19/44 (43%) | 9.3e−08 |
| | | 32/44 (73%) | |
| ldl_recept_a | 305 . . . 342 | 18/43 (42%) | 7.9e−10 |
| | | 30/43 (70%) | |
| ldl_recept_a | 344 . . . 379 | 21/43 (49%) | 8.3e−10 |
| | | 30/43 (70%) | |
| ldl_recept_a | 385 . . . 416 | 19/43 (44%) | 2.9e−09 |
| | | 28/43 (65%) | |
| Fz | 445 . . . 571 | 54/150 (36%) | 2.2e−52 |
| | | 108/150 (72%) | |
| ldl_recept_a | 578 . . . 618 | 16/43 (37%) | 0.0046 |
| | | 25/43 (58%) | |
| ldl_recept_a | 619 . . . 655 | 16/43 (37%) | 0.00099 |
| | | 28/43 (65%) | |
| Trypsin | 766 . . . 994 | 101/263 (38%) | 2e−75 |
| | | 179/263 (68%) | |

### Example 21

[0429] The NOV21 clone was analyzed, and the nucleotide and encoded polypeptide sequences are shown in Table 21A.

TABLE 21A
NOV21 Sequence Analysis

| | |
|---|---|
| SEQ ID NO: 63 | 4840 bp |

| | |
|---|---|
| NOV 21a, | CGCTCTCCCCGCCCCCTCCCTCCCTCGCAGGGGCCGAGCGAATGTAGCCCGCGAGAGA |
| CG125363- | |
| 01 DNA | AAATGGCGGCGGCGGCGGGGAATCGCGCCTCGTCGTCGGGATTCCCGGGCGCCAGGGC |
| Sequence | |
| | TACGAGCCCTGAGCAGCGCGGCGGAGAGGCCCTCAAGGCGAGCAGCGCGCCCGCGGCT |
| | GCCGCGGGACTGCTGCGGGAGGCGGGCAGCGGGGTGCCTGGCGAGCGGGCGGACTGGC |
| | GGCGGCGGCAGCTGCGCAAAGTGCGGAGTGTGGAGCTGGACCAGCTGCCTGAGCAGCC |
| | GCTCTTCCTTGCCGCCTCACCGCCGGCCTCCTCGACTTCCCCGTCGCCGGAGCCCGCG |
| | GACGCAGCGGGGAGTGGGACCGGCTTCCAGCCTGTGGCGGTGCCGCCGCCCCACGGAG |
| | CCGCCAGCCGCGGCGGCGCCCACCTTACCGAGTCGGTGGCGGCGCCGGACAGCGGCGC |
| | CTCGAGTCCCGCAGCGGCCGAGCCCGGGGAGAAGCGGGCGCCCGCCGCCGAGCCGTCT |
| | CCTGCAGCGGCCCCCGCCGGTCGTGAGATGGAGAATAAAGAAACTCTCAAAGGGTTGC |
| | ACAAGATGGATGATCGTCCAGAGGAACGAATGATCAGGGAGAAACTGAAGGCAACCTG |
| | TATGCCAGCCTGGAAGCACGAATGGTTGGAAAGGAGAAATAGGCGAGGGCCTGTGGTG |
| | GTAAAACCAATCCCAGTTAAAGGAGATGGATCTGAAATGAATCACTTAGCAGCTGAGT |
| | CTCCAGGAGAGGTCCAGGCAAGTGCGGCTTCACCAGCTTCCAAAGGCCGACGCAGTCC |
| | TTCTCCTGGCAACTCCCCATCAGGTCGCACAGTGAAATCAGAATCTCCAGGAGTAAGG |
| | AGAAAAAGAGTTTCCCCAGTGCCTTTTCAGAGTGGCAGAATCACACCACCCCGAAGAG |
| | CCCCTTCACCAGATGGCTTCTCACCATATAGCCCTGAGGAAACAAACCGCCGTGTTAA |
| | CAAAGTGATGCGGGCCAGACTGTACTTACTGCAGCAGATAGGGCCTAACTCTTTCCTG |
| | ATTGGAGGAGACAGCCCAGACAATAAATACCGGGTGTTTATTGGGCCTCAGAACTGCA |
| | GCTGTGCACGTGGAACATTCTGTATTCATCTGCTATTTGTGATGCTCCGGGTGTTTCA |
| | ACTAGAACCTTCAGACCCAATGTTATGGAGAAAAACTTTAAAGAATTTTGAGGTTGAG |
| | AGTTTGTTCCAGAAATATCACAGTAGGCGTAGCTCAAGGATCAAAGCTCCATCTCGTA |
| | ACACCATCCAGAAGTTTGTTTCACGCATGTCAAATTCTCATACATTGTCATCATCTAG |
| | TACTTCTACATCTAGTTCAGAAAACAGCATAAAGGATGAAGAGGAACAGATGTGTCCT |
| | ATTTGCTTGTTGGGCATGCTTGATGAAGAAAGTCTTACAGTGTGTGAAGACGGCTGCA |
| | GGAACAAGCTGCACCACCACTGCATGTCAATTTGGGCAGAAGAGTGTAGAAGAAATAG |
| | AGAACCTTTAATATGTCCCCTTTGTAGATCTAAGTGGAGATCTCATGATTTCTACAGC |
| | CACGAGTTGTCAAGTCCTGTGGATTCCCCTTCTTCCCTCAGAGCTGCACAGCAGCAAA |
| | CCGTACAGCAGCAGCCTTTGGCTGGATCACGAAGGAATCAAGAGAGCAATTTTAACCT |
| | TACTCATTATGGAACTCAGCAAATCCCTCCTGCTTACAAAGATTTAGCTGAGCCATGG |
| | ATTCAGGTGTTTGGAATGGAACTCGTTGGCTGCTTATTTTCTAGAAACTGGAATGTGA |
| | GAGAGATGGCCCTCAGGCGTCTTTCCCATGATGTCAGTGGGGCCCTGCTGTTGGCAAA |
| | TGGGGAGAGCACTGGAAATTCTGGGGGCAGCAGTGGAAGCAGCCCGAGTGGGGGAGCC |
| | ACCAGTGGGTCTTCCCAGACCAGTATCTCAGGAGATGTGGTGGAGGCATGCTGCAGCG |
| | TTCTGTCAATGGTCTGTGCTGACCCTGTCTACAAAGTGTACGTTGCTGCTTTAAAAAC |
| | ATTGAGAGCCATGCTGGTATATACTCCTTGCCACAGTTTAGCGGAAAGAATCAAACTT |
| | CAGAGACTTCTCCAGCCAGTTGTAGACACCATCCTAGTCAAATGTGCAGATGCGAATA |
| | GCCGCACAAGTCAGCTGTCCATATCAACACTGTTGGAACTGTGCAAAGGCCAAGCAGG |
| | AGAGTTGGCAGTTGGCAGAGAAATACTAAAAGCTGGATCCATTGGTATTGGTGGTGTT |
| | GATTATGTCTTAAATTGTATTCTTGGAAACCAAACTGAATCAAACAATTGGCAAGAAC |
| | TTCTTGGCCGCCTTTCTCTTATAGATAGACTGTTGTTGGAATTTCCTGCTGAATTTTA |
| | TCCTCATATTGTCAGTACTGATGTTTCACAAGCTGAGCCTGTTGAAATCAGGTATAAG |
| | AAGCTGCTGTCCCTCTTAACCTTTGCTTTGCAGTCCATTGATAATTCCCACTCAATGG |
| | TTGGCAAACTTTCCAGAAGGATCTACTTGAGTTCTGCAAGAATGGTTACTACAGTACC |
| | CCATGTGTTTTCAAAACTGTTAGAAATGCTGAGTGTTTCCAGTTCCACTCACTTCACC |
| | AGGATGCGTCGCCGTTTGATGGCTATTGCAGATGAGGTCGAAATTGCCGAAGCCATCC |
| | AGTTGGGCGTAGAAGACACTTTGGATGGTCAACAGGACAGCTTCTTGCAGGCATCTGT |
| | TCCCAACAACTATCTGGAAACCACAGAGAACAGTTCCCCTGAGTGCACAGTCCATTTA |
| | GAGAAAACTGGAAAAGGATTATGTGCTACAAAATTGAGTGCCAGTTCAGAGGACATTT |
| | CTGAGAGACTGGCCAGGATTTCAGTAGGACCTTCTAGTTCAACAACAACAACAACAAC |
| | AACAACAGAGCAACCAAAGCCAATGGTTCAAACAAAAGGCAGACCCCACAGTCAGTGT |
| | TTGAACTCCTCTCCTTTATCTCATCATTCCCAATTAATGTTTCCAGCCTTGTCAACCC |
| | CTTCTTCTTCTACCCCATCTGTACCAGCTGGCACTGCAACAGATGTCTCTAAGCATAG |
| | ACTTCAGGGATTCATTCCCTGCAGAATACCTTCTGCATCTCCTCAAACACAGCGCAAG |
| | TTTTCTCTACAATTCCACAGAAACTGTCCTGAAAACAAAGACTCAGATAAACTTTCCC |
| | CAGTCTTTACTCAGTCAAGACCCTTGCCCTCCAGTAACATACACAGGCCAAAGCCATC |
| | TCGACCTACCCCAGGTAATACAAGTAAACAGGGAGATCCCTCAAAAAATAGCATGACA |
| | CTTGATCTGAACAGTAGTTCCAAATGTGATGACAGCTTTGGCTGTAGCAGCAATAGTA |
| | GTAATGCTGTTATACCCAGTGACGAGACAGTGTTCACCCCAGTAGAGGAGAAATGCAG |
| | ATTAGATGTCAATACAGAGCTCAACTCCAGTATTGAGGACCTTCTTGAAGCATCTATG |
| | CCTTCAAGTGATACAACAGTAACTTTTAAGTCAGAAGTTGCTGTCCTGTCTCCTGAAA |
| | AGGCTGAAAATGATGATACCTACAAAGATGATGTGAATCATAATCAAAAGTGCAAAGA |
| | GAAGATGGAAGCTGAAGAAGAAGAAGCTTTAGCAATTGCCATGGCAATGTCAGCGTCT |
| | CAGGATGCCCTCCCCATAGTTCCTCAGCTGCAGGTTGAAAATGGAGAAGATATCATCA |
| | TTATTCAACAGGATACACCAGAGACTCTACCAGGACATACCAAAGCAAAACAACCGTA |
| | TAGAGAAGACACTGAATGGCTGAAAGGTCAACAGATAGGCCTTGGAGCATTTTCTTCT |
| | TGTTATCAGGCTCAAGATGTGGGAACTGGAACTTTAATGGCTGTTAAACAGGTGACTT |
| | ATGTCAGAAACACATCTTCTGAGCAAGAAGAAGTAGTAGAAGCACTAAGAGAAGAGAT |
| | AAGAATGATGAGCCATCTGAATCATCCAAACATCATTAGGATGTTGGGAGCCACGTGT |
| | GAGAAGAGCAATTACAATCTCTTCATTGAATGGATGGCAGGGGGATCGGTGGCTCATT |
| | TGCTGAGTAAATATGGAGCCTTCAAAGAATCAGTAGTTATTAACTACACTGAACAGTT |
| | ACTCCGTGGCCTTTCGTATCTCCATGAAAACCAAATCATTCACAGAGATGTCAAAGGT |
| | GCCAATTTGCTAATTGACAGCACTGGTCAGAGACTAAGAATTGCAGATTTTGGAGCTG |
| | CAGCCAGGTTGGCATCAAAAGGAACTGGTGCAGGAGAGTTTCAGGGACAATTACTGGG |
| | GACAATTGCATTTATGGCACCTGAGGTACTAAGAGGTCAACAGTATGGAAGGAGCTGT |
| | GATGTATGGAGTGTTGGCTGTGCTATTATAGAAATGGCTTGTGCAAAACCACCATGGA |
| | ATGCAGAAAAACACTCCAATCATCTTGCTTTGATATTTAAGATTGCTAGTGCAACTAC |
| | TGCTCCATCGATCCCTTCACATTTGTCTCCTGGTTTACGAGATGTGGCTCTTCGTTGT |
| | TTAGAACTTCAACCTCAGGACAGACCTCCATCAAGAGAGCTACTGAAGCATCCAGTCT |
| | TTCGTACTACATGGTAGCCAATTATGCAGATCAACTACAGTAGAAACAGGATGCTCAA |
| | CAAGAGAAAAAAAACTTGTGGGGAACCACATTGATATTCTACTGGCCATGATGCCACT |
| | GAACAGCTATGAACGAGGCCAGTGGGGAACCCTTACCTAAGTATGTGATTGACAAATC |
| | ATGATCTGTACCTAAGCTCAGTATGCAAAAGCCCAAACTAGTGCAGAAACTGTAAACT |

| | |
|---|---|
| ORF Start: ATG at 61 | ORF Stop: TAG at 4597 |

| | | |
|---|---|---|
| SEQ ID NO: 64 | 1512 aa | MW at 164748.2 kD |

| | |
|---|---|
| NOV21a, | MAAAAGNRASSSGFPGARATSPEQRGGEALKASSAPAAAAGLLREAGSGVPGERADWR |
| CG125363- | |
| 01 Protein | RRQLRKVRSVELDQLREQPLFLAASPPASSTSPSPEPADAAGSGTGFQPVAVPPPHGA |
| Sequence | |
| | ASRGGAHLTESVAAPDSGASSPAAAEPGEKRAPAAEPSPAAAPAGREMENKETLKGLH |
| | KMDDRPEERMIREKLKATCMPAWKHEWLERRNRRGPVVVKPIPVKGDGSEMNHLAAES |
| | PGEVQASAASPASKGRRSPSPGNSPSGRTVKSESPGVRRKRVSPVPFQSGRITPPRRA |
| | RSPDGFSPYSPEETNRRVNKVMRARLYLLQQIGPNSFLIGGDSPDNKYRVFIGPQNCS |
| | CARGTFCIHLLFVMLRVFQLEPSDPMLWRKTLKNFEVESLFQKYHSRRSSRIKAPSRN |
| | TIQKFVSRMSNSHTLSSSSTSTSSSENSIKDEEEQMCPICLLGMLDEESLTVCEDGCR |
| | NKLHHHCMSIWAEECRRNREPLICPLCRSKWRSHDFYSHELSSPVDSPSSLRAAQQQT |
| | VQQQPLAGSRRNQESNFNLTHYGTQQIPPAYKDLAEPWIQVFGMELVGCLFSRNWNVR |
| | EMALRRLSHDVSGALLLANGESTGNSGGSSGSSPSGGATSGSSQTSISGDVVEACCSV |
| | LSMVCADPVYKVYVAALKTLRAMLVYTPCHSLAERIKLQRLLQPVVDTILVKCADANS |
| | RTSQLSISTLLELCKGQAGELAVGREILKAGSIGIGGVDYVLNCILGNQTESNNWQEL |
| | LGRLCLIDRLLLEFPAEFYPHIVSTDVSQAEPVEIRYKKLLSLLTFALQSIDNSHSMV |
| | GKLSRRIYLSSARMVTTVPHVFSKLLEMLSVSSSTHFTRMRRRLMAIADEVEIAEAIQ |
| | LGVEDTLDGQQDSFLQASVPNNYLETTENSSPECTVHLEKTGKGLCATKLSASSEDIS |
| | ERLARISVGPSSSTTTTTTTTEQPKPMVQTKGRPHSQCLNSSPLSHHSQLMFPALSTP |
| | SSSTPSVPAGTATDVSKHRLQGFIPCRIPSASPQTQRKPSLQFHRNCPENKDSDKLSP |
| | VFTQSRPLPSSNIHRPKPSRPTPGNTSKQGDPSKNSMTLDLNSSSKCDDSFGCSSNSS |
| | NAVIPSDETVFTPVEEKCRLDVNTELNSSIEDLLEASMPSSDTTVTFKSEVAVLSPEK |
| | AENDDTYKDDVNHNQKCKEKMEAEEEEALAIAMAMSASQDALPIVPQLQVENGEDIII |
| | IQQDTPETLPGHTKAKQPYREDTEWLKGQQIGLGAFSSCYQAQDVGTGTLMAVKQVTY |
| | VRNTSSEQEEVVEALREEIRMMSHLNHPNIIRMLGATCEKSNYNLFIEWMAGGSVAHL |
| | LSKYGAFKESVVINYTEQLLRGLSYLHENQIIHRDVKGANLLIDSTGQRLRIADFGAA |
| | ARLASKGTGAGEFQGQLLGTIAFMAPEVLRGQQYGRSCDVWSVGCAIIEMACAKPPWN |
| | AEKHSNHLALIFKIASATTAPSIPSHLSPGLRDVALRCLELQPQDRRPSRELLKHPVF |
| | RTTW |

[0430] Further analysis of the NOV21a protein yielded the following properties shown in Table 21B.

TABLE 21B
Protein Sequence Properties NOV21a

| | |
|---|---|
| PSort | 0.8800 probability located in nucleus; 0.4689 probability |
| analysis: | located in mitochondrial matrix space: 0.3000 probability |
| | located in microbody (peroxisome); 0.1702 probability located |
| | in mitochondrial inner membrane |
| SignalP | No Known Signal Sequence Predicted |
| analysis: | |

[0431] A search of the NOV2a protien against the Geneseq database, a proprietor, database that contains sequences published in patents and patent publication, yielded several homologous proteins shown in Table 21C.

TABLE 21C
Geneseq Results for NOV21a

| | | NOV21a | | |
|---|---|---|---|---|
| | Protein/Organism/ | Residues/ | Identities/ | |
| Geneseq | Length [Patent #, | Match | Similarities for | Expect |
| Identifier | Date] | Residues | the Matched Region | Value |
| ABG04377 | Novel human diagnostic protein | 21 . . . 1512 | 1456/1495 (97%) | 0.0 |
| | #4368-Homo sapiens, 1495 aa. | 2 . . . 1495 | 1459/1495 (97%) | |
| | [WO200175067-A2, 11 Oct. 2001] | | | |
| AAG80184 | Human MEK kinase MEKK1 protein | 21 . . . 1512 | 1456/1495 (97%) | 0.0 |
| | fragment-Homo sapiens, 1495 aa. | 2 . . . 1495 | 1459/1495 (97%) | |
| | [WO200179501-A2, 25 Oct. 2001] | | | |
| AAB60291 | Human MEKK1-Homo sapiens, | 21 . . . 1512 | 1456/1495 (97%) | 0.0 |
| | 1495 aa. [U.S. Pat. No. 6168950-B1, | 2 . . . 1495 | 1459/1495 (97%) | |
| | 2 Jan. 2001] | | | |
| ABG04377 | Novel human diagnostic protein | 21 . . . 1512 | 1456/1495 (97%) | 0.0 |
| | #4368-Homo sapiens, 1495 aa. | 2 . . . 1495 | 1459/1495 (97%) | |
| | [WO200175067-A2, 11 Oct. 2001] | | | |
| ABG01872 | Novel human diagnostic protein | 46 . . . 1419 | 1342/1376 (97%) | 0.0 |
| | #1863-Homo sapiens, 1375 aa. | 1 . . . 1375 | 1345/1376 (97%) | |
| | [WO200175067-A2, 11 Oct. 2001] | | | |

[0432] In a BLAST search of public sequence databases, the NOV21a protein was found to have homology to the proteins shown in the BLASTP data in Table 21D.

TABLE 21D
Public BLASTP Results for NOV21a

| | | NOV21a | | |
|---|---|---|---|---|
| Protein | | Residues/ | Identities/ | |
| Accession | | Match | Similarities for | Expect |
| Number | Protein/Organism/Length | Residues | the Matched Portion | Value |
| Q13233 | Mitogen-activated protein kinase kinase | 21 . . . 1512 | 1456/1495 (97%) | 0.0 |
| | kinase 1 (EC 2.7.1.-) (MAPK/ERK | 2 . . . 1495 | 1459/1495 (97%) | |
| | kinase kinase 1) (MEK kinase 1) | | | |
| | (MEKK 1)-Homo sapiens (Human), | | | |
| | 1495 aa (fragment). | | | |
| P53349 | Mitogen-activated protein kinase kinase | 1 . . . 1512 | 1354/1519 (89%) | 0.0 |
| | kinase 1 (EC 2.7.1.-) (MAPK/ERK | 1 . . . 1493 | 1400/1519 (92%) | |
| | kinase kinase 1) (MEK kinase 1) | | | |
| | (MEKK 1)-Mus musculus (Mouse), | | | |
| | 1493 aa. | | | |
| Q62925 | Mitogen-activated protein kinase kinase | 1 . . . 1512 | 1343/1514 (88%) | 0.0 |
| | kinase 1 (EC 2.7.1.-) (MAPK/ERK | 1 . . . 1493 | 1387/1514 (90%) | |
| | kinase kinase 1) (MEK kinase 1) | | | |
| | (MEKK 1)-Rattus norvegicus (Rat), | | | |
| | 1493 aa. | | | |
| A46212 | MEK kinase-mouse, 687 aa. | 811 . . . 1512 | 628/702 (89%) | 0.0 |
| | | 1 . . . 687 | 649/702 (91%) | |
| A48084 | STE11 protein kinase homolog NPK1- | 1227 . . . 1506 | 121/288 (42%) | 6e−59 |
| | common tobacco, 706 aa. | 74 . . . 356 | 181/288 (62%) | |

[0433] PFam analysis predicts that the NOV21a protein contains the domains shown in the Table 21E.

TABLE 21E
Domain Analysis of NOV21a

| | | Identities/ | |
|---|---|---|---|
| Pfam | | Similarities for | Expect |
| Domain | NOV21a Match Region | the Matched Region | Value |
| PHD | 442 . . . 494 | 13/53 (25%) | 0.3 |
| | | 31/53 (58%) | |
| Pkinase | 1243 . . . 1508 | 87/305 (29%) | 5.9e−81 |
| | | 210/305 (69%) | |

### Example 22

[0434] The NOV22 clone was analyzed, and the nucleotide and encoded polypeptide sequences are shown in Table 22A.

TABLE 22A
NOV22 Sequence Analysis

| | |
|---|---|
| SEQ ID NO:65 | 2121 bp |

| | |
|---|---|
| NOV22a, | GGAGGAAGCGTGGAAATGTGCTTCCGGACAAAGCTCTCAGTATCCTGGGTGCCATTGT |
| CG126012- | |
| 01 DNA | TTCTTCTACTCAGCCGTGTTTTTTCTACTGAGACAGACAAACCCTCAGCCCAGGATAG |
| Sequence | |
| | CAGAAGCCGTGGGAGTTCAGGCCAACCGGCAGACCTGCTACAGGTTCTCTCTGCTGGT |
| | GACCACCCACCCCACAACCACTCAAGAAGCCTCATCAAAACATTGTTGGAGAAAACTG |
| | GGTGCCCACGGAGGAGAAACGGAATGCAAGGAGATTGCAATCTGTGTTTTCTTCCACA |
| | GTGCTTTGAACCAGATGCACTATTACTAATAGCTGGAGGAAATTTTGAAGATCAGCTT |
| | AGAGAAGAAGTGGTCCAGAGAGTTTCTCTTCTCCTTCTCTATTACATTATTCATCAGG |
| | AAGAGATCTGTTCTTCAAAGCTCAACATGAGTAATAAAGAGTATAAATTTTACCTACA |
| | CAGCCTACTGAGCCTCAGGCAGGATGAAGATTCCTCTTTCCTTTCACAGAATGAGACA |
| | GAAGATATCTTGGCTTTCACCAGCCAGTACTTTGACACTTCTCAAAGCCAGTGTATGG |
| | AAACCAAAACGCTGCAGAAAAAATCTGGAATAGTGAGCAGTGAAGGTGCTAATGAAAG |
| | TACGCTTCCTCAGTTGGCAGCCATGATCATTACTTTGTCCCTCCAGGGTGTTTGTCTG |
| | GGACAAGGAAACTTGCCTTCCCCAGACTACTTTACAGAATATATTTTCAGTTCCTTGA |
| | ATCGTACGAATACCCTCCGCCTATCAGAACTAGACCAACTCCTCAACACTCTCTGGAC |
| | CAGAAGTACTTGTATCAAAAATGAGAAAATCCATCAATTTCAAAGGAAACAAAACAAC |
| | ATAATAACCCATGATCAGGACTATTCTAATTTCTCTTCATCCATGGAAAAAGAGTCTG |
| | AGGATGGTCCAGTTTCCTGGGATCAGACCTGCTTCTCTGCTAGGCAGCTGGTGGAGAT |
| | ATTTCTACAGAAGGGCCTCTCACTCATTTCTAAGGAGGACTTTAAGCAAATGAGTCCA |
| | GGGATCATCCAGCAGCTCCTCAGCTGCTCCTGCCACTTACCCAAGGACCAACAAGCAA |
| | AGCTGCCACCTACCACTCTGGAGGAATACGGCTACAGCACGGTGGCTGTCACCCTTCT |
| | CACACTGGGCTCCATGCTGGGGACAGCGCTGGTCCTTTTCCATAGCTGTGAGGAGAAC |
| | TACAGGCTTATCTTACAGCTGTTTGTGGGCTTGGCCGTCGGGACACTGTCTGGGGACG |
| | CTCTGCTCCACCTTATCCCTCAGGTACTTGGTTTACATAAGCAGGAAGCCCCAGAATT |
| | TGGGCATTTCCATGAAAGCAAAGGTCATATTTGGAAACTGATGGGATTAATTGGAGGC |
| | ATCCATGGATTTTTCTTGATAGAAAAATGTTTTATTCTTCTTGTATCACCAAATGACA |
| | AGAAAAGCCCAGAAGATTCACAGGCAGCTGAAATGCCTATAGGCAGTATGACAGCCTC |
| | CAACAGAAAATGTAAAGCCATTAGCTTGTTAGCAATCATGATTCTGGTTGGGGACAGC |
| | CTGCATAATTTTGCAGATGGCCTAGCCATAGGAGCAGCCTTCTCATCATCATCCGAGT |
| | CAGGAGTGACCACTACGATTGCTATCTTGTGTCATGAAATCCCACATGAAATGGGAGA |
| | CTTTGCCGTGCTCTTAAGCTCTGGACTTTCTATGAAGACTGCCATCCTGATGAATTTT |
| | ATAAGCTCCCTAACTGCCTTCATGGGATTATACATTGGCCTTTCCGTGTCAGCTGATC |
| | CATGTGTTCAAGACTGGATCTTCACAGTCACTGCTGGGATGTTCTTATATTTATCCTT |
| | GGTTGAAATGCCTGAAATGACTCATGTTCAAACACAACGACCCTGGATGATGTTTCTC |
| | CTGCAAAACTTTGGATTGATCCTAGGTTGGCTTTCTCTCCTGCTCTTGGCTATATATG |
| | AGCAAAATATTAAAATATAAGTGAGGATCTTCAACATCTTTCAAAAATGCATTTATAT |
| | AGTCTTACTTTGTTTCTTTCATTGCACTCTATAATGATTTTTAAATTAAGAATTTTTT |
| | ATCTTAGGCAAAGTGTGTCTCTTTCAATTCATT |

| | |
|---|---|
| ORF Start: ATG at 16 | ORF Stop: TAA at 1990 |

| | | |
|---|---|---|
| SEQ ID NO: 66 | 658 aa | MW at 73339.6 kD |

| | |
|---|---|
| NOV22a, | MCFRTKLSVSWVPLFLLLSRVFSTETDKPSAQDSRSRGSSGQPADLLQVLSAGDHPPH |
| CG126012- | |
| 01 Protein | NHSRSLIKTLLEKTGCPRRRNGMQGDCNLCFLPQCFEPDALLLIAGGNFEDQLREEVV |
| Sequence | |
| | QRVSLLLLYYIIHQEEICSSKLNMSNKEYKFYLHSLLSLRQDEDSSFLSQNETEDILA |
| | FTRQYFDTSQSQCMETKTLQKKSGIVSSEGANESTLPQLAAMIITLSLQGVCLGQGNL |
| | PSPDYFTEYIFSSLNRTNTLRLSELDQLLNTLWTRSTCIKNEKIHQFQRKQNNIITHD |
| | QDYSNFSSSMEKESEDGPVSWDQTCFSARQLVEIFLQKGLSLISKEDFKQMSPGIIQQ |
| | LLSCSCHLPKDQQAKLPPTTLEEYGYSTVAVTLLTLGSMLGTALVLFHSCEENYRLIL |
| | QLFVGLAVGTLSGDALLHLIPQVLGLHKQEAPEFGHFHESKGHIWKLMGLIGGIHGFF |
| | LIEKCFILLVSPNDKKSPEDSQAAEMPIGSMTASNRKCKAISLLAIMILVGDSLHNFA |
| | DGLAIGAAFSSSSESGVTTTIAILCHEIPHEMGDFAVLLSSGLSMKTAILMNFISSLT |
| | AFMGLYIGLSVSADPCVQDWIFTVTAGMFLYLSLVEMPEMTHVQTQRPWMMFLLQNFG |
| | LILGWLSLLLLAIYEQNIKI |

[0435] Further analysis of the NOV22a protean yielded the following properties shown in Table 22D.

TABLE 22B
Protein Sequence Properties NOV22a

| | |
|---|---|
| PSort | 0.6400 probability located in plasma membrane; 0.4600 |
| analysis: | probability located in Golgi body; 0.3700 probability |
| | located in endoplasmic reticulum (membrane); 0.1000 |
| | probability located in endoplasmic reticulum (lumen) |
| SignalP | Cleavage site between residues 24 and 25 |
| analysis: | |

[0436] A search of the NOV22a protein against the Geneseq database, a proprietary database that contains sequences published in patents and patent publication, yielded several homologous proteins shown in Table 22C.

TABLE 22C
Geneseq Results for NOV22a

| | | NOV22a | | |
|---|---|---|---|---|
| | Protein/Organism/ | Residues/ | Identities/ | |
| Geneseq | Length [Patent #, | Match | Similarities for | Expect |
| Identifier | Date] | Residues | the Matched Region | Value |
| AAB42004 | Human ORFX ORF1768 polypeptide | 81 . . . 248 | 163/168 (97%) | 5e−87 |
| | sequence SEQ ID NO: 3536-Homo | 1 . . . 163 | 163/168 (97%) | |
| | sapiens, 163 aa. [WO200058473-A2, | | | |
| | 5 Oct. 2000] | | | |
| ABB14720 | Human nervous system related | 1 . . . 167 | 160/167 (95%) | 9e−87 |
| | polypeptide SEQ ID NO 3377-Homo | 38 . . . 199 | 160/167 (95%) | |
| | sapiens, 206 aa. [WO200159063-A2, | | | |
| | 16 Aug. 2001] | | | |
| AAU74620 | Oestrogen-regulated LIV-1 family | 190 . . . 656 | 183/526 (34%) | 3e−76 |
| | protein BAB24106_Mm-Mus | 140 . . . 658 | 279/526 (52%) | |
| | musculus, 660 aa. [WO200196372-A2, | | | |
| | 20 Dec. 2001] | | | |
| AAU69470 | Human purified secretory polypeptide | 331 . . . 465 | 110/136 (80%) | 8e−54 |
| | #39-Homo sapiens, 172 aa. | 1 . . . 136 | 117/136 (85%) | |
| | [WO200162918-A2, 30 Aug. 2001] | | | |
| AAB59035 | Breast and ovarian cancer associated | 481 . . . 656 | 88/177 (49%) | 4e−44 |
| | antigen protein sequence SEQ ID 743- | 26 . . . 202 | 122/177 (68%) | |
| | Homo sapiens, 204 aa. [WO200055173- | | | |
| | A1, 21 Sep. 2000] | | | |

[0437] In a BLAST search of public sequence databases, the NOV22a protein was found to have homology to the proteins shown in the BLASTP data in Table 22D.

TABLE 22D
Public BLASTP Results for NOV22a

| | | NOV22a | | |
|---|---|---|---|---|
| Protein | | Residues/ | Identities/ | |
| Accession | | Match | Similarities for | Expect |
| Number | Protein/Organism/Length | Residues | the Matched Portion | Value |
| Q96NN4 | CDNA FLJ30499 fis, clone | 1 . . . 658 | 651/659 (98%) | 0.0 |
| | BRAWH2000443, weakly similar to human | 1 . . . 654 | 652/659 (98%) | |
| | breast cancer, estrogen regulated LIV-1 | | | |
| | protein (LIV-1) mRNA-Homo sapiens | | | |
| | (Human), 654 aa. | | | |
| Q95KA5 | Hypothetical 72.8 kDa protein-Macaca | 1 . . . 657 | 629/658 (95%) | 0.0 |
| | fascicularis (Crab eating macaque) | 1 . . . 653 | 642/658 (96%) | |
| | (Cynomolgus monkey), 654 aa. | | | |
| Q96LF0 | BA570F3.1 (Novel protein (Possible | 187 . . . 554 | 367/368 (99%) | 0.0 |
| | ortholog of a hypothetical protein from | 1 . . . 368 | 368/368 (99%) | |
| | macaca fascicularis clone QmoA-11613) | | | |
| | similar to hypothetical proteins from other | | | |
| | model organisms.)-Homo sapiens | | | |
| | (Human), 368 aa (fragment). | | | |
| Q9DAT9 | 1600025H15Rik protein (RIKEN cDNA | 190 . . . 656 | 183/526 (34%) | 8e−76 |
| | 1600025H15 gene)-Mus musculus | 140 . . . 658 | 279/526 (52%) | |
| | (Mouse), 660 aa. | | | |
| Q9H6T8 | CDNA: FLJ21884 fis, clone HEP02863- | 39 . . . 656 | 199/664 (29%) | 4e−71 |
| | Homo sapiens (Human), 647 aa. | 21 . . . 645 | 310/664 (45%) | |

[0438] PFam analysis predicts that the NOV22a protein contains the domains shown in the Table 22E.

TABLE 22E
Domain Analysis of NOV22a

| | | Identities/ | |
|---|---|---|---|
| Pfam | | Similarities for | Expect |
| Domain | NOV22a Match Region | the Matched Region | Value |
| Zip | 504 . . . 650 | 59/178 (33%) | 4e−34 |
| | | 117/178 (66%) | |

### Example 23

[0439] The NOV23 clone was analyzed, and the nucleotide and encoded polypeptide sequences are shown in Table 23A.

TABLE 23A
NOV23 Sequence Analysis

| | |
|---|---|
| SEQ ID NO: 67 | 1152 bp |

| | |
|---|---|
| NOV23a, | TACTGCCGCAGCGGAGTTCAGAGGGCCCGGAGGTGGGAGACTTCCCACACGGTGACTG |
| CG126481- | |
| 01 DNA | AGATGTCGTCCACTGCGGCTTTTTACCTTCTCTCTACGCTAGGAGGATACTTGGTGAC |
| Sequence | |
| | CTCATTCTTGTTGCTTAAATACCCGACCTTGCTGCACCAGAGAAAGAAGCAGCGATTC |
| | CTCAGTAAACACATCTCTCACCGCGGAGGTGCTGGAGAAAATTTGGAGAATACAATGG |
| | CAGCCTTTCAGCATGCGGTTAAAATCGGAACTGATATGCTAGAATTGGACTGCCATAT |
| | CACAAAAGATGAACAAGTTGTAGCGTCACATGATGAGAATCTAAAGAGAGCAACTGGG |
| | GTCAATGTAAACATCTCTGATCTCAAATACTGTGAGCTCCCACCTTACCTTGGCAAAC |
| | TGGATGTCTCATTTCAAAGAGCATGCCAGTGTGAAGGAAAAGATAACCGAATTCCATT |
| | ACTGAAGGAAGTTTTTGAGGCCTTTCCTAACACTCCCATTAACATCGATATCAAAGTC |
| | AACAACAATGTGCTGATTAAGAAGGTATCAGAGTTGGTGAAGCGGTATAATCGAGAAC |
| | ACTTAACAGTGTGGGGTAATGCCAATTATGAAATTGTAGAAAAGTGCTACAAAGAGAA |
| | TTCAGATATTCCTATACTCTTCAGTCTACAACGTGTCCTGCTCATTCTTGGCCTTTTC |
| | TTCACTGGCCTCTTGCCCTTTGTGCCCATTCGAGAACAGTTTTTTGAAATCCCAATGC |
| | CTTCTATTATACTGAAGCTAAAAGAACCACACACCATGTCCAGAAGTCAAAAGTTTCT |
| | CATCTGGCTTTCTGATCTCTTACTAATGAGGAAAGCTTTGTTTGACCACCTAACTGCT |
| | CGAGGCATTCAAGTGTATATTTGGGTATTAAATGAAGAACAAGAATACAAAAGAGCTT |
| | TTGATTTGGGAGCAACTGGGGTGATGACAGACTATCCAACAAAGCTTAGGGATTTTTT |
| | ACATAACTTTTCAGCATAGAAAAAGAGGTACTTAGAAGTATTGAAGGAAAAAATGAAG |
| | ACCTAAGAAAAAAATATTTCATGATCATTTCCCTAAGCCATTTCCAGAATGGTAAAAG |
| | GTTTAATCAGTTTTTATTACCTCATTTTTAAGCCTGTATGAGAATGTAGA |

| | |
|---|---|
| ORF Start: ATG at 61 | ORF Stop: EAG at 1003 |

| | | |
|---|---|---|
| SEQ ID NO:68 | 314 aa | MW at 36138.7 kD |

| | |
|---|---|
| NOV23a, | MSSTAAFYLLSTLGGYLVTSFLLLKYPTLLHQRKKQRFLSKHISHRGGAGENLENTMA |
| CG126481- | |
| 01 Protein | AFQHAVKIGTDMLELDCHITKDEQVVASHDENLKRATGVNVNISDLKYCBLPPYLGKL |
| Sequence | |
| | DVSFQRACQCEGKDNRIPLLKEVFEAFPNTPTNIDIKVNNNVLIKKVSELVKRYNREH |
| | LTVWGNANYEIVEKCYKENSDIPILFSLQRVLLILGLFFTGLLPFVPIREQFFETPMP |
| | SIILKLKEPHTMSRSQKFLIWLSDLLLMRKALFDHLTARGIQVYIWVLNEEQEYKRAF |
| | DLGATGVMTDYPTKLRDFLHNFSA |

| | |
|---|---|
| SEQ ID NO:69 | 1070 bp |

| | |
|---|---|
| NOV23b, | AGTTCAGAGGGCCCGGAGGTGGGAGACTTCCCACACGGTGACTGAGATGTCGTCCACT |
| CG126481- | |
| 02 DNA | GCGGCTTTTTACCTTCTCTCTACGCTAGGAGGATACTTGGTGACCTCATTCTTGTTGC |
| Sequence | |
| | TTAAATACCCGACCTTGCTGCACCAGAGAAAGAAGCAGCGATTCCTCAGTAAACACAT |
| | CTCTCACCGCGGAGGTGCTGGAGAAAATTTGGAGAATACAATGGCAGCCTTTCAGCAT |
| | GCGGTTAAAATCGGAACTGATATGCTAGAATTGGACTGCCATATCACAAAAGATGAAC |
| | AAGTTGTAGTGTCACATGATGAGAATCTAAAGAGAGCAACTGGGGTCAATGTAAACAT |
| | CTCTGATCTCAAATACTGTGAGCTCCCACCTTACCTTGGCAAACTGGATGTCTCATTT |
| | CAAAGAGCATGCCAGTGTGAAGGAAAAGATAACCGAATTCCATTACTGAAGGAAGTTT |
| | TTGAGGCCTTTCCTAACACTCCCATTAACATCGATATCAAAGTCAACAACAATGTGCT |
| | GATTAAGAAGGTTTCAGAGTTGGTGAAGCGGTATAATCGAGAACACTTAACAGTGTGG |
| | GGTAATGCCAATTATGAAATTGTAGAAAAGTGCTACAAAGAGAATTCAGATATTCCTA |
| | TACTCTTCAGTCTACAACGTGTCCTGCTCATTCTTGGCCTTTTCTTCACTGGCCTCTT |
| | GCCCTTTGTGCCCATTCGAGAACAGTTTTTTGAAATCCCAATGCCTTCTATTATACTG |
| | AAGCTAAAAGAACCACACACCATGTCCAGAAGTCAAAAGTTTCTCATCTGGCTTTCTG |
| | ATCTCTTACTAATGAGGAAAGCTTTGTTTGACCACCTAACTGCTCGAGGCATTCAAGT |
| | GTATATTTGGGTATTAAATGAAGAACAAGAATACAAAAGAGCTTTTGATTTGGGAGCA |
| | ACTGGGGTGATGACAGACTATCCAACAAAGCTTAGGGATTTTTTACATAACTTTTCAG |
| | CATAGAAAAAGAGGTACTTAGAAGTATTGAATTAAAAAATGAAGACCTAAGAAAAAAA |
| | TATTTCATGATCATTTCCCTAAGCCA |

| | |
|---|---|
| ORF Start: ATG at 47 | ORF Stop: TAG at 989 |

| | | |
|---|---|---|
| SEQ ID NO:70 | 314 aa | MW at 36166.7 kD |

| | |
|---|---|
| NOV23b, | MSSTAAFYLLSTLGGYLVTSFLLLKYPTLLHQRKKQRFLSKHTSHRGGAGENLENTMA |
| CG126481- | |
| 02 Protein | AFQHAVKIGTDMLELDCHITKDEQVVVSHDENLKRATGVNVNISDLKYCELPPYLGKL |
| Sequence | |
| | DVSFQRACQCEGKDNRIPLLKEVFEAFPNTPINIDIKVNNNVLIKKVSELVKRYNREH |
| | LTVWGNANYEIVEKCYKENSDIPILFSLQRVLLILGLFFTGLLPFVPIREQFFEIPMP |
| | SIILKLKEPHTMSRSQKFLIWLSDLLLMRKALFDHLTARGIQVYIWVLNEEQEYKRAF |
| | DLGATGVMTDYPTKLRDFLHNFSA |

| | |
|---|---|
| SEQ ID NO:71 | 961 bp |

| | |
|---|---|
| NOV23c, | CACCGGATCCATGTCGTCCACTGCGGCTTTTTACCTTCTCTCTACGCTAGGAGGATAC |
| 278459554 | |
| DNA | TTGGTGACCTCATTCTTGTTGCTTAAATACCCGACCTTGCTGCACCAGAGAAAGAAGC |
| Sequence | |
| | AGCGATTCCTCAGTAAACACATCTCTCACCGCGGAGGTGCTGGAGAAAATTTGGAGAA |
| | TACAATGGCAGCCTTTCAGCATGCGGTTAAAATCGGAACTGATATGCTAGAATTGGAC |
| | TGCCATATCACAAAAGATGAACAAGTTGTAGTGTCACATGATGAGAATCTAAAGAGAG |
| | CAACTGGGGTCAATGTAAACATCTCTGATCTCAAATACTGTGAGCTCCCACCTTACCT |
| | TGGCAAACTGGATGTCTCATTTCAAAGAGCATGCCAGTGTGAAGGAAAAGATAACCGA |
| | ATTCCATTACTGAAGGAAGTTTTTGAGGCCTTTCCTAACACTCCCATTAACATCGATA |
| | TCAAAGTCAACAACAATGTGCTGATTAAGAAGGTTTCAGAGTTGGTGAAGCGGTATAA |
| | TCGAGAACACTTAACAGTGTGGGGTAATGCCAATTATGAAATTGTAGAAAAGTGCTAC |
| | AAAGAGAATTCAGATATTCCTATACTCTTCAGTCTACAACGTGTCCTGCTCATTCTTG |
| | GCCTTTTCTTCACTGGCCTCTTGCCCTTTGTGCCCATTCGAGAACAGTTTTTTGAAAT |
| | CCCAATGCCTTCTATTATACTGAAGCTAAAAGAACCACACACCATGTCCAGAAGTCAA |
| | AAGTTTCTCATCTGGCTTTCTGATCTCTTACTAATGAGGAAAGCTTTGTTTGACCACC |
| | TAACTGCTCGAGGCATTCAAGTGTATATTTGGGTATTAAATGAAGAACAAGAATACAA |
| | AAGAGCTTTTGATTTGGGAGCAACTGGGGTGATGACAGACTATCCAACAAAGCTTAGG |
| | GATTTTTTACATAACTTTTCAGCAGTCGACGGC |

| | |
|---|---|
| ORF Start: at 2 | ORF Stop: end of sequence |

| | | |
|---|---|---|
| SEQ ID NO: 72 | 320 aa | MW at 36683.2 kD |

| | |
|---|---|
| NOV23c, | TGSMSSTAAFYLLSTLGGYLVTSFLLLKYPTLLHQRKKQRFLSKHISHRGGAGENLEN |
| 278459554 | |
| Protein | TMAAFQHAVKIGTDMLELDCHTTKDEQVVVSHDENLKRATGVNVNISDLKYCELPPYL |
| Sequence | |
| | GKLDVSFQRACQCEGKDNRIPLLKEVFEAFPNTPINIDIKVNNNVLIKKVSELVKRYN |
| | REHLTVWGNANYEIVEKCYKENSDIPILFSLQRVLLILGLFFTGLLPFVPIREQFFEI |
| | PMPSIILKLKEPHTMSRSQKFLIWLSDLLLMRKALFDHLTARGIQVYIWVLNEEQEYK |
| | RAFDLGATGVMTDYPTKLRDFLHNFSAVDG |

| | |
|---|---|
| SEQ ID NO:73 | 865 bp |

| | |
|---|---|
| NOV23d, | CACCGGATCCAGAAAGAAGCAGCGATTCCTCAGTAAACACATCTCTCACCGCGGAGGT |
| 278463211 | |
| DNA | GCTGGAGAAAATTTGGAGAATACAATGGCAGCCTTTCAGCATGCGGTTAAAATCGGAA |
| Sequence | |
| | CTGATATGCTAGAATTGGACTGCCATATCACAAAAGATGAACAAGTTGTAGTGTCACA |
| | TGATGAGAATCTAAAGAGAGCAACTGGGGTCAATGTAAACATCTCTGATCTCAAATAC |
| | TGTGAGCTCCCACCTTACCTTGGCAAACTGGATGTCTCATTTCAAAGAGCATGCCAGT |
| | GTGAAGGAAAAGATAACCGAATTCCATTACTGAAGGAAGTTTTTGAGGCCTTTCCTAA |
| | CACTCCCATTAACATCGATATCAAAGTCAACAACAATGTGCTGATTAAGAAGGTTTCA |
| | GAGTTGGTGAAGCGGTATAATCGAGAACACTTAACAGTGTGGGGTAATGCCAATTATG |
| | AAATTGTAGAAAAGTGCTACAAAGAGAATTCAGATATTCCTATACTCTTCAGTCTACA |
| | ACGTGTCCTGCTCATTCTTGGCCTTTTCTTCACTGGCCTCTTGCCCTTTGTGCCCATT |
| | CGAGAACAGTTTTTTGAAATCCCAATGCCTTCTATTATACTGAAGCTAAAAGAACCAC |
| | ACACCATGTCCAGAAGTCAAAAGTTTCTCATCTGGCTTTCTGATCTCTTACTAATGAG |
| | GAAAGCTTTGTTTGACCACCTAACTGCTCGAGGCATTCAAGTGTATATTTGGGTATTA |
| | AATGAAGAACAAGAATACAAAAGAGCTTTTGATTTGGGAGCAACTGGGGTGATGACAG |
| | ACTATCCAACAAAGCTTAGGGATTTTTTACATAACTTTTCAGCAGTCGACGGC |

| | |
|---|---|
| ORF Start: at 2 | ORF Stop: end of sequence |

| | | |
|---|---|---|
| SEQ ID NO: 74 | 288 aa | MW at 33151.1 kD |

| | |
|---|---|
| NOV23d, | TGSRKKQRFLSKHISHRGGAGENLENTMAAFQHAVKIGTDMLELDCHITKDEQVVVSH |
| 278463211 | |
| Protein | DENLKRATGVNVNISDLKYCELPPYLGKLDVSFQRACQCEGKDNRIPLLKEVFEAFPN |
| Sequence | |
| | TPINIDIKVNNNVLIKKVSELVKRYNREHLTVWGNANYEIVEKCYKENSDIPILFSLQ |
| | RVLLILGLFFTGLLPFVPIREQFFEIPMPSIILKLKEPHTMSRSQKFLIWLSDLLLMR |
| | KALFDHLTARGIQVYIWVLNEEQEYKRAFDLGATGVMTDYPTKLRDFLHNFSAVDG |

| | |
|---|---|
| SEQ ID NO: 75 | 805 bp |

| | |
|---|---|
| NOV93e, | CACCGGATCCCACCGCGGAGGTGCTGGAGAAAATTTGGAGAATACAATGGCAGCCTTT |
| 278465805 | |
| DNA | CAGCATGCGGTTAAAATCGGAACTGATATGCTAGAATTGGACTGCCATATCACAAAAG |
| Sequence | |
| | ATGAACAAGTTGTAGTGTCACATGATGAGAATCTAAAGAGAGCAACTGGGGTCAATGT |
| | AAACATCTCTGATCTCAAATACTGTGAGCTCCCACCTTACCTTGGCAAACTGGATGTC |
| | TCATTTCAAAGAGCATGCCAGTGTGAAGGAAAAGATAACCGAATTCCATTACTGAAGG |
| | AAGTTTTTGAGGCCTTTCCTAACACTCCCATTAACATCGATATCAAAGTCAACAACAA |
| | TGTGCTGATTAAGAAGGTTTCAGAGTTGGTGAAGCGGTATAATCGAGAACACTTAACA |
| | GTGTGGGGTAATGCCAATTATGAAATTGTAGAAAAGTGCTACAAAGAGAATTCAGATA |
| | TTCCTATACTCTTCAGTCTACAACGTGTCCTGCTCATTCTTGGCCTTTTCTTCACTGG |
| | CCTCTTGCCCTTTGTGCCCATTCGAGAACAGTTTTTTGAAATCCCAATGCCTTCTATT |
| | ATACTGAAGCTAAAAGAACCACACACCATGTCCAGAAGTCAAAAGTTTCTCATCTGGC |
| | TTTCTGATCTCTTACTAATGAGGAAAGCTTTGTTTGACCACCTAACTGCTCGAGGCAT |
| | TCAAGTGTATATTTGGGTATTAAATGAAGAACAAGAATACAAAAGAGCTTTTGATTTG |
| | GGAGCAACTGGGGTGATGACAGACTATCCAACAAAGCTTAGGGTCGACGGC |

| | |
|---|---|
| ORF Start: at 2 | ORF Stop: end of sequence |

| | | |
|---|---|---|
| SEQ ID NO: 76 | 268 aa | MW at 30709.3 kD |

| | |
|---|---|
| NOV23e, | TGSHRGGAGENLENTMAAFQHAVKIGTDMLELDCHITKDEQVVVSHDENLKRATGVNV |
| 278465805 | |
| Protein | NISDLKYCELRPYLGKLDVSFQRACQCEGKDNRIPLLKEVFEAFPNTPINIDIKVNNN |
| Sequence | |
| | VLIKKVSELVKRYNREHLTVWGNANYEIVEKCYKENSDIPILFSLQRVLLILGLFFTG |
| | LLPFVPIREQFFETPMPSIILKLKEPHTMSRSQKFLIWLSDLLLMRKALFDHLTARGI |
| | QVYIWVLNEEQEYKRAFDLGATGVMTDYPTKLRVDG |

[0440] Sequence comparison of the above protein sequences yields the following sequence relationships shown in Table 23B.

TABLE 23B
Comparison of NOV23a against NOV23b through NOV23e

| | | Identities/ |
|---|---|---|
| | NOV23a Residues/ | Similarities for |
| Protein Sequence | Match Residues | the Matched Region |
| NOV23b | 1 . . . 314 | 301/314 (95%) |
| | 1 . . . 314 | 301/314 (95%) |
| NOV23c | 1 . . . 314 | 301/314 (95%) |
| | 4 . . . 317 | 301/314 (95%) |
| NOV23d | 33 . . . 314 | 269/282 (95%) |
| | 4 . . . 285 | 269/282 (95%) |
| NOV23e | 44 . . . 306 | 250/263 (95%) |
| | 3 . . . 265 | 250/263 (95%) |

[0441] Further analysis of the NOV23a protein yielded the following properties shown in Table 23C.

TABLE 23C
Protein Sequence Properties NOV23a

| | |
|---|---|
| PSort | 0.7300 probability located in plasma membrane; 0.6400 |
| analysis: | probability located in endoplasmic reticulum (membrane); |
| | 0.1000 probability located in endoplasmic reticulum |
| | (lumen); 0.1000 probability located in outside |
| SignalP | Cleavage site between residues 33 and 34 |
| analysis: | |

[0442] search of the NOV23a protein against the Geneseq database, a proprietary database that contains sequences published in patents and patent publications yielded several homologous proteins shown in Table 23D.

TABLE 23D
Geneseq Results for NOV23a

| | | NOV23a | | |
|---|---|---|---|---|
| | Protein/Organism/ | Residues/ | Identities/ | |
| Geneseq | Length [Patent #, | Match | Similarities for | Expect |
| Identifier | Date] | Residues | the Matched Region | Value |
| AAM49156 | Human Myb protein 32-Homo | 1 . . . 268 | 265/268 (98%) | e−152 |
| | sapiens, 289 aa. [CN1325886-A, | 1 . . . 268 | 266/268 (98%) | |
| | 12 Dec. 2001] | | | |
| ABB09007 | Human phosphodiesterase-3-Homo | 1 . . . 192 | 191/192 (99%) | e−109 |
| | sapiens, 210 aa. [WO200198471-A2, | 1 . . . 192 | 191/192 (99%) | |
| | 27 Dec. 2001] | | | |
| AAE05493 | Human phosphodiesterase-3 (HPDE- | 3 . . . 311 | 129/309 (41%) | 5e−70 |
| | 3)-Homo sapiens, 318 aa. | 2 . . . 310 | 198/309 (63%) | |
| | [WO200155358-A2, 2 Aug. 2001] | | | |
| AAU27639 | Human protein AFP471025-Homo | 3 . . . 303 | 125/301 (41%) | 1e−67 |
| | sapiens, 330 aa. [WO200166748-A2, | 2 . . . 302 | 192/301 (63%) | |
| | 13 Sep. 2001] | | | |
| AAM41071 | Human polypeptide SEQ ID NO 6002- | 68 . . . 311 | 104/244 (42%) | 9e−55 |
| | Homo sapiens, 300 aa. | 50 . . . 292 | 159/244 (64%) | |
| | [WO200153312-A1, 26 Jul. 2001] | | | |

[0443] In a BLAST search of public sequence databases, the NOV23a protein was found to have homology to the proteins shown in the BLASTP data in Table 23E.

TABLE 23E
Public BLASTP Results for NOV23a

| | | NOV23a | | |
|---|---|---|---|---|
| Protein | | Residues/ | Identities/ | |
| Accession | | Match | Similarities for | Expect |
| Number | Protein/Organism/Length | Residues | the Matched Portion | Value |
| Q9CRY7 | 2610020H15Rik protein (RIKEN | 1 . . . 314 | 288/314 (91%) | e−168 |
| | cDNA 2610020H15 gene)-Mus | 1 . . . 314 | 299/314 (94%) | |
| | musculus (Mouse), 314 aa (fragment). | | | |
| Q9D4X7 | 2610020H15Rik protein-Mus | 1 . . . 314 | 287/314 (91%) | e−167 |
| | musculus (Mouse), 314 aa. | 1 . . . 314 | 298/314 (94%) | |
| Q9CT14 | 2610020H15Rik protein-Mus | 51 . . . 314 | 236/264 (89%) | e−137 |
| | musculus (Mouse), 341 aa (fragment). | 78 . . . 341 | 247/264 (93%) | |
| CAC88621 | Sequence 51 from Patent WO0166748- | 3 . . . 303 | 125/301 (41%) | 3e−67 |
| | Homo sapiens (Human), 330 aa. | 2 . . . 302 | 192/301 (63%) | |
| Q9D1C0 | 1110015E22Rik protein-Mus | 7 . . . 309 | 121/303 (39%) | 1e−64 |
| | musculus (Mouse), 330 aa. | 6 . . . 308 | 188/303 (61%) | |

[0444] PFam analysis predicts that the NOV23a protein contains the domains shown in the Table 23F.

TABLE 23F
Domain Analysis of NOV23a

| | | Identities/ | |
|---|---|---|---|
| Pfam | | Similarities for | Expect |
| Domain | NOV23a Match Region | the Matched Region | Value |
| GDPD | 45 . . . 306 | 60/283 (21%) | 3.6e−19 |
| | | 179/283 (63%) | |

### Example 24

[0445] The NOV24 clone was analyzed, and the nucleotide and encoded polypeptide sequences are shown in Table 24A.

TABLE 24A
NOV24 Sequence Analysis

| | |
|---|---|
| SEQ ID NO: 77 | 1092 bp |

| | |
|---|---|
| NOV24a, | CTTAGCGAGCGCTGGAGTTTGAAGAGCGGGCAGTGGCTGCACACGCCAAACTTTCCCT |
| CG127851- | |
| 01 DNA | ATGGCTTCGGTGACCAGGGCCGTGTTTGGAGAGCTGCCCTCGGGAGGAGGGACAGTGG |
| Sequence | |
| | AGAAGTTCCAGCTGCAGTCAGACCTCTTGAGAGTGGACATCATCTCCTGGGGCTGCAC |
| | GATCACAGCCCTAGAGGTCAAAGACAGGCAGGGGAGAGCCTCGGACGTGGTGCTTGGC |
| | TTCGCCGAGTTGGAAGTGTACCTCCAAAAGCAGCCATACTTTGGAGCAGTTATTGGGA |
| | GGGTGGCCAACCGAATCGCCAAAGGAACCTTCAAGGTGGATGGGAAGGAGTATCACCT |
| | GGCCATTAACAAGGAACCCAACAGTCTGCATGGAGGAGTCAGAGGGTTTGATAAAGTA |
| | CTATGGACCCCTCGGGTGCTGTCAAATGGCGTCCAGTTCTCGCGCATCAGTCCAGATG |
| | GTGAAGAAGGCTACCCCGGAGAGTTAAAAGTCTGGGTGACATACACCCTGGATGGCGG |
| | AGAGCTCATAGTCAACTACAGAGCACAAGCCAGTCAGGCCACACCAGTCAACCTGACC |
| | AACCATTCTTACTTCAACCTGGCAGGCCAGGCTTCCCCAAATATAAATGACCATGAAG |
| | TCACCATAGAAGCGGATACTTATTTGCCTGTGGATGAAACCCTGATTCCTACAGGTGA |
| | GGTTGCCCCAGTGCAAGGCACTGCATTCGACCTGAGAAAGCCAGTGGAGCTTGGAAAA |
| | CACCTGCAGGACTTCCATCTCAATGGTTTTGACCACAATTTCTGTCTGAAGGGATCTA |
| | AAGAAAAGCATTTTTGTGCAAGGGTGCATCATGCTGCAAGCGGGCGGGTACTAGAAGT |
| | ATACACCACCCAGCCCGGGGTCCAGTTTTACACGGGCAACTTCCTGGATGGCACATTA |
| | AAGGGCAAGAATGGAGCTGTCTATCCCAAGCACTCCGGTTTCTGCCTGGAGACTCAGA |
| | ACTGGCCTGATGCAGTCAATCAGCCCCGCTTCCCTCCTGTGCTGCTGAGGCCTGGTGA |
| | GGAGTATGACCACACCACCTGGTTCAAGTTTTCTGTGGCTTAAGGAAG |

| | |
|---|---|
| ORF Start: ATG at 59 | ORF Stop: TAA at 1085 |

| | | |
|---|---|---|
| SEQ ID NO: 78 | 342 aa | MW at 37807.4 kD |

| | |
|---|---|
| NOV24a, | MASVTRAVFGELRSGGGTVEKPQLQSDLLRVDIISWGCTITALEVKDRQGRASDVVLG |
| CG127851- | |
| 01 Protein | FAELEVYLQKQRYFGAVIGRVANRIAKGTFKVDGKEYHLAINKEPNSLHGGVRGFDKV |
| Sequence | |
| | LWTPRVLSNGVQFSRISPDGEEGYPGELKVWVTYTLDGGELIVNYRAQASQATPVNLT |
| | NHSYFNLAGQASPNINDHEVTIEADTYLPVDETLIPTGEVAPVQGTAFDLRKPVELGK |
| | HLQDFHLNGFDHNFCLKGSKEKHFCARVHHAASGRVLEVYTTQPGVQFYTGNFLDGTL |
| | KGKNGAVYPKHSGFCLETQNWPDAVNQPRFPPVLLRPGEEYDHTTWFKFSVA |

| | |
|---|---|
| SEQ ID NO: 79 | 1099 bp |

| | |
|---|---|
| NOV24b, | CGCCCTTCTTAGCGAGCGCTGGAGTTTGAAGAGCGGGCAGTGGCTGCACACGCCAAAC |
| CG127851- | |
| 02 DNA | TTTCCCTATGGCTTCGGTGACCAGGGCCGTGTTTGGAGAGCTGCCCTCGGGAGGAGGG |
| Sequence | |
| | ACAGTGGAGAAGTTCCAGCTGCAGTCAGACCTCTTGAGAGTGGACATCATCTCCTGGG |
| | GCTGCACGATCACAGCCCTAGAGGTCAAAGACAGGCAGGGGAGAGCCTCGGACGTGGT |
| | GCTTGGCTTCGCCGAGTTGGAAGGATACCTCCAAAAGCAGCCATACTTTGGAGCAGTT |
| | ATTGGGAGGGTGGCCAACCGAATCGCCAAAGGAACCTTCAAGGTGGATGGGAAGGAGT |
| | ATCACCTGGCCATTAACAAGGAACCCAACAGTCTGCATGGAGGAGTCAGAGGGTTTGA |
| | TAAAGTGCTCTGGACCCCTCGGGTGCTGTCAAATGGCGTCCAGTTCTCGCGCATCAGT |
| | CCAGATGGTGAAGAAGGCTACCCCGGAGAGTTAAAAGTCTGGGTGACATACACCCTGG |
| | ATGGCGGAGAGCTCATAGTCAACTACAGAGCACAAGCCAGTCAGGCCACACCAGTCAA |
| | CCTGACCAACCATTCTTACTTCAACCTGGCAGGCCAGGCTTCCCCAAATATAAATGAC |
| | CATGAAGTCACCATAGAAGCGGATACTTATTTGCCTGTGGATGAAACCCTGATTCCTA |
| | CAGGAGAAGTTGCCCCAGTGCAAGGCACTGCATTCGACCTGACAAAGCCAGTGGAGCT |
| | TGGAAAACACCTGCAGGACTTCCATCTCAATGGTTTTGACCACAATTTCTGTCTGAAG |
| | GGATCTAAAGAAAAGCATTTTTGTGCAAGGGTGCATCATGCTGCAAGCGGGCGGGTAC |
| | TAGAAGTATACACCACCCAGCCCGGGGTCCAGTTTTACACGGGCAACTTCCTGGATGG |
| | CACATTAAAGGGCAAGAATGGAGCTGTCTATCCCAAGCACTCCGGTTTCTGCCTGGAG |
| | ACTCAGAACTGGCCTGATGCAGTCAATCAGCCCCGCTTCCCTCCTGTGCTGCTGAGGC |
| | CTGGTGAGGAGTATGACCACACCACCTGGTTCAAGTTTTCTGTGGCTTAAGGAAG |

| | |
|---|---|
| ORF Start: ATG at 66 | ORF Stop: TAA at 1092 |

| | | |
|---|---|---|
| SEQ ID NO: 80 | 1342 aa | MW at 37710.2 kD |

| | |
|---|---|
| NOV24b, | MASVTRAVFGELPSGGGTVEKFQLQSDLLRVDIISWGCTITALEVKDRQGRASDVVLG |
| CG127851- | |
| 02 Protein | FAELEGYLQKQPYFGAVIGRVANRIAKGTFKVDGKEYHLAINKEPNSLHGGVRGFDKV |
| Sequence | |
| | LWTPRVLSNGVQFSRISPDGEEGYPGELKVWVTYTLDGGELIVNYRAQASQATPVNLT |
| | NHSYFNLAGQASPNINDHEVTIEADTYLPVDETLIPTGEVAPVQGTAFDLTKPVELGK |
| | HLQDFHLNGFDHNFCLKGSKEKHFCARVHHAASGRVLEVYTTQPGVQFYTGNFLDGTL |
| | KGKNGAVYPKHSGFCLETQNWPDAVNQPRFPPVLLRPGEEYDHTTWFKFSVA |

[0446] Sequence comparison of the above protein sequences yields the following sequence relationships shown in Table 24B.

TABLE 24B
Comparison of NOV24a against NOV24b.

| | | Identities/ |
|---|---|---|
| | NOV24a Residues/ | Similarities for |
| Protein Sequence | Match Residues | the Matched Region |
| NOV24b | 1 . . . 342 | 340/342 (99%) |
| | 1 . . . 342 | 340/342 (99%) |

[0447] Further analysis of the NOV24a protein yielded the following properties shown in Table 24C.

TABLE 24C
Protein Scquence Properties NOV24a

| | |
|---|---|
| PSort | 0.6400 probability located in microbody (peroxisome): 0.4500 |
| analysis: | probability located in cytoplasm; 0.2445 probability located |
| | in lysosome (lumen); 0.1000 probability located in |
| | mitochondrial matrix space |
| SignalP | No Known Signal Sequence Predicted |
| analysis: | |

[0448] A search of the NOV24a protein against the Geneseq database, a proprietary database that contains sequences published in patents and patent publication, yielded several homologous proteins shown in Table 24D.

TABLE 24D
Geneseq Results for NOV24a

| | | NOV24a | | |
|---|---|---|---|---|
| | Protein/Organism/ | Residues/ | Identities/ | |
| Geneseq | Length [Patent #, | Match | Similarities for | Expect |
| Identifier | Date] | Residues | the Matched Region | Value |
| AAR70142 | Porcine mutarotase (MUT) enzyme- | 3 . . . 342 | 305/340 (89%) | 0.0 |
| | Sus scrofa, 341 aa. [JP07039380-A, | 2 . . . 341 | 322/340 (94%) | |
| | 10 Feb. 1995] | | | |
| AAR72964 | Pig kidney cell mutarotase protein-Sus | 3 . . . 342 | 305/340 (89%) | 0.0 |
| | scrofa, 341 aa. [JP06253856-A, | 2 . . . 341 | 322/340 (94%) | |
| | 13 Sep. 1994] | | | |
| AAM40101 | Human polypeptide SEQ ID NO 3246- | 1 . . . 259 | 258/259 (99%) | e−150 |
| | Homo sapiens, 268 aa. [WO200153312- | 1 . . . 259 | 258/259 (99%) | |
| | A1, 26 Jul. 2001] | | | |
| AAG49126 | Arabidopsis thaliana protein fragment | 18 . . . 340 | 153/336 (45%) | 2e−76 |
| | SEQ ID NO: 62115-Arabidopsis | 8 . . . 340 | 215/336 (63%) | |
| | thaliana, 341 aa. [EP1033405-A2, | | | |
| | 6 Sep. 2000] | | | |
| AAG49127 | Arabidopsis thaliana protein fragment | 29 . . . 340 | 149/325 (45%) | 2e−74 |
| | SEQ ID NO: 62116-Arabidopsis | 1 . . . 322 | 209/325 (63%) | |
| | thaliana, 323 aa. [EP1033405-A2, | | | |
| | 6 Sep. 2000] | | | |

[0449] In a BLAST search of public sequence databases, the NOV24a protein was found to have homology to the proteins shown in the BLASTP data in Table 24E.

TABLE 24E
Public BLASTP Results for NOV24a

| | | NOV22a | | |
|---|---|---|---|---|
| Protein | | Residues/ | Identities/ | |
| Accession | | Match | Similarities for | Expect |
| Number | Protein/Organism/Length | Residues | the Matched Portion | Value |
| Q96C23 | Hypothetical 37.8 kDa protein- | 1 . . . 342 | 341/342 (99%) | 0.0 |
| | Homo sapiens (Human), 342 aa. | 1 . . . 342 | 341/342 (99%) | |
| Q9GKX6 | Aldose 1-epimerase (EC 3.1.3.3)- | 1 . . . 342 | 306/342 (89%) | 0.0 |
| | Sus scrofa (Pig), 342 aa. | 1 . . . 342 | 323/342 (93%) | |
| AAH28818 | Similar to hypothetical protein | 1 . . . 342 | 297/342 (86%) | 0.0 |
| | BC014916-Mus musculus | 1 . . . 342 | 318/342 (92%) | |
| | (Mouse), 342 aa. | | | |
| AAL62475 | BLOCK 25-Homo sapiens | 1 . . . 212 | 211/212 (99%) | e−120 |
| | (Human), 221 aa. | 1 . . . 212 | 211/212 (99%) | |
| Q9RDN0 | Putative aldose 1-epimerase- | 6 . . . 339 | 159/346 (45%) | 8e−81 |
| | Streptomyces coelicolor, 366 aa. | 20 . . . 364 | 220/346 (62%) | |

[0450] PFam analysis predicts that the NOV24a protein contains the domains shown in the Table 24F.

TABLE 24F
Domain Analysis of NOV24a

| | | Identities/ | |
|---|---|---|---|
| Pfam | NOV24a | Similarities for | Expect |
| Domain | Match Region | the Matched Region | Value |
| Aldose_epim | 8 . . . 340 | 140/371 (38%) | 2.4e−104 |
| | | 243/371 (65%) | |

### Example 25

[0451] The NOV25 clone was analyzed, and the nucleotide and encoded polypeptide sequences are shown in Table 25A.

TABLE 25A
NOV25 Sequence Analysis

| | |
|---|---|
| SEQ ID NO:81 | 1197 bp |

| | |
|---|---|
| NOV25a. | TTGATACTTCCGCAAATGGGAAAATCTGGAGTCCTGGAAAGCCCCAGGAGCTCTGATA |
| CG 127906- | |
| 01 DNA | TTCTCTGCACACACGCAGAGGCAAGTAACACACACACTTTGTTGCTGCAGAATGACTC |
| Sequence | |
| | GCGTTGGAGCCTTTTGTGCCAGGAGGAGGGGACCTGGTTTCTGGCTGGAATCAGAGAC |
| | TTTCCCAGTGGCTGTCTACGTCCCCGAGCCTTCTTCCCTCTGCAGACTCATGGCCCAT |
| | GGATCAGCCATGTGACTCGGGGAGCCTACCTGGAGGACCAGCTAGCCTGGGATTGGGG |
| | CCCTGATGGGGAGGAGACTGAGACACAGACTTGTCCCCCACACACAGAGCATGGTGCC |
| | TGTGGCCTGCGGCTGGAGGCTGCTCCAGTGGGGGTCCTGTGGCCCTGGCTGGCAGAGG |
| | TGCATGTGGCTGGTGATCGAGTCTGCACTGGGATCCTCCTGGCCCCAGGCTGGGTCCT |
| | GGCAGCCACTCACTGTGTCCTCAGGCCAGGCTCTACAACAGTGCCTTACATTGAAGTG |
| | TATCTGGGCCGGGCAGGGGCCAGCTCCCTCCCACAGGGCCACCAGGTATCCCGCTTGG |
| | TCATCAGCATCCGGCTGCCCCAGCACCTGGGACTCAGGCCCCCCCTGGCCCTCCTGGA |
| | GCTGAGCTCCCGGGTGGAGCCCTCCCCATCAGCCCTGCCCATCTGTCTCCACCCGGCG |
| | GGTATCCCCCCGGGGGCCAGCTGCTGGGTGTTGGGCTGGAAAGAACCCCAGGACCGAG |
| | TCCCTGTGGCTGCTGCTGTCTCCATCTTGACACAACGAATCTGTGACTGCCTCTATCA |
| | GGGCATCCTGCCCCCTGGAACCCTCTGTGTCCTGTATGCAGAGGGGCAGGAGAACAGG |
| | TGTGAGATGACCTCAGCACCGCCCCTCCTGTGCCAGATGACGGAAGGGTCCTGGATCC |
| | TCGTGGGCATGGCTGTTCAAGGGAGCCGGGAGCTGTTTGCTGCCATTGGTCCTGAAGA |
| | GGCCTGGATCTCCCAGACAGTGGGAGAGGCCAACTTCCTGCCCCCCAGTGGCTCCCCA |
| | CACTGGCCCACTGGAGGCAGCAATCTCTGCCCCCCAGAACTGGCCAAGGCCTCGGGAT |
| | CCCCGCATGCAGTCTACTTCCTGCTCCTGCTGACTCTCCTGATCCAGAGCTGAGGGGC |
| | TAGGGTCCCAGCACCACTTCCCCCTTCTCCACCCTCT |

| | |
|---|---|
| ORF Start: ATG at 16 | ORF Stop: TGA at 1153 |

| | | |
|---|---|---|
| SEQ ID NO: 82 | 379 aa | MW at 40786.3 kD |

| | |
|---|---|
| NOV25a, | MGKSGVLESPRSSDILCTHAEASNTHTLLLQNDSRWSLLCQEEGTWFLAGIRDFPSGC |
| CG127906- | |
| 01 Protein | LRPRAFFPLQTHGPWISHVTRGAYLEDQLAWDWGPDGEETETQTCPPHTEHGACGLRL |
| Sequence | |
| | EAAPVGVLWPWLAEVHVAGDRVCTGILLAPGWVLAATHCVLRPGSTTVPYIEVYLGRA |
| | GASSLPQGHQVSRLVISIRLPQHLGLRPPLALLELSSRVEPSPSALPICLHPAGIPPG |
| | ASCWVLGWKEPQDRVPVAAAVSILTQRICDCLYQGILPPGTLCVLYAEGQENRCEMTS |
| | APPLLCQMTEGSWILVGMAVQGSRELFAAIGPEEAWISQTVGEANFLPPSGSPHWPTG |
| | GSNLCPPELAKASGSPHAVYFLLLLTLLIQS |

[0452] Further analysis of the NOV25a protein yielded the following properties shown in Table 25B.

TABLE 25B
Protein Sequence Properties NOV25a

| | |
|---|---|
| PSort | 0.4526 probability located in microbody (peroxisome); 0.4500 |
| analysis: | probability located in cytoplasm; 0.2266 probability located |
| | in lysosome (lumen); 0.1000 probability located in |
| | mitochondrial matrix space |
| SignalP | No Known Signal Sequence Predicted |
| analysis: | |

[0453] A search of the NOV25a protein against the Geneseq database, a proprietary database that contains sequences published in patents and patent publication, yielded several homologous proteins shown in Table 25C.

TABLE 25C
Geneseq Results for NOV25a

| | | NOV25a | | |
|---|---|---|---|---|
| | Protein/Organism/ | Residues/ | Identities/ | |
| Geneseq | Length [Patent #, | Match | Similarities for | Expect |
| Identifier | Date] | Residues | the Matched Region | Value |
| AAM93568 | Human polypeptide, SEQ ID NO: 3347- | 32 . . . 379 | 347/348 (99%) | 0.0 |
| | Homo sapiens, 766 aa. [EP1130094- | 419 . . . 766 | 347/348 (99%) | |
| | A2, 5 Sep. 2001] | | | |
| AAU82753 | Amino acid sequence of novel human | 69 . . . 379 | 311/311 (100%) | 0.0 |
| | protease #52-Homo sapiens, 818 aa. | 508 . . . 818 | 311/311 (100%) | |
| | [WO200200860-A2, 3 Jan. 2002] | | | |
| ABG06892 | Novel human diagnostic protein #6883- | 69 . . . 379 | 300/311 (96%) | 0.0 |
| | Homo sapiens, 692 aa. | 392 . . . 692 | 300/311 (96%) | |
| | [WO200175067-A2, 11 Oct. 2001] | | | |
| ABG06892 | Novel human diagnostic protein #6883- | 69 . . . 379 | 300/311 (96%) | 0.0 |
| | Homo sapiens, 692 aa. | 392 . . . 692 | 300/311 (96%) | |
| | [WO200175067-A2, 11 Oct. 2001] | | | |
| AAE06934 | Human membrane-type serine protease | 108 . . . 312 | 70/225 (31%) | 2e−22 |
| | (MTSP) 4-S splice variant-Homo | 411 . . . 631 | 109/225 (48%) | |
| | sapiens, 658 aa. [WO200157194-A2, | | | |
| | 9 Aug. 2001] | | | |

[0454] In a BLAST search of public sequence databases, the NOV25a protein was found to have homology to the proteins shown in the BLASTP data in Table 25D.

TABLE 25D
Public BLASTP Results for NOV25a

| | | NOV25a | | |
|---|---|---|---|---|
| Protein | | Residues/ | Identities/ | |
| Accession | | Match | Similarities for | Expect |
| Number | Protein/Organism/Length | Residues | the Matched Portion | Value |
| CAC60381 | Sequence 9 from Patent WO0157194- | 108 . . . 312 | 70/225 (31%) | 5e−22 |
| | Homo sapiens (Human), 658 aa. | 411 . . . 631 | 109/225 (48%) | |
| CAC60380 | Sequence 7 from Patent WO0157194- | 108 . . . 312 | 70/225 (31%) | 5e−22 |
| | Homo sapiens (Human), 802 aa. | 555 . . . 775 | 109/225 (48%) | |
| CAC60379 | Sequence 5 from Patent WO0157194- | 125 . . . 312 | 64/201 (31%) | 2e−21 |
| | Homo sapiens (Human), 235 aa | 12 . . . 208 | 98/201 (47%) | |
| | (fragment) | | | |
| Q9QUL7 | Tryptase gamma precursor (EC | 118 . . . 346 | 77/249 (30%) | 6e−21 |
| | 3.4.21.-) (Transmembrane tryptase)- | 35 . . . 276 | 107/249 (42%) | |
| | Mus musculus (Mouse), 311 aa. | | | |
| Q9DB10 | 1300008A22Rik protein-Mus | 108 . . . 312 | 70/225 (31%) | 2e−20 |
| | musculus (Mouse), 799 aa. | 552 . . . 772 | 105/225 (46%) | |

[0455] PFam analysis predicts that the NOV25a protein contains the domains shown in the Table 25E.

TABLE 25E
Domain Analysis of NOV25a

| | | Identities/ | |
|---|---|---|---|
| Pfam | | Similarities for | Expect |
| Domain | NOV25a Match Region | the Matched Region | Value |
| Trypsin | 125 . . . 240 | 41/140 (29%) | 2.6e−09 |
| | | 74/140 (53%) | |

### Example 26

[0456] The NOV26 clone was analyzed, and the nucleotide and encoded polypeptide sequences are shown in Table 26A.

TABLE 26A
NOV26 Sequence Analysis

| | |
|---|---|
| SEQ ID NO: 83 | 2897 bp |

| | |
|---|---|
| NOV26a, | GGCACGAGGGCGATGGCGACGGTCGCAGCAAATCCAGCTGCTGCTGCGGCGGCTGTGG |
| CG128021- | |
| 01 DNA | CGGCGGCAGCGGCGGTGACTGAGGATAGAGAGCCACAGCACGAGGAGCTGCCAGGCCT |
| Sequence | |
| | GGACAGCCAGTGGCGCCAGATAGAAAACGGCGAGAGTGGGCGAGAACGTCCACTGCGG |
| | GCCGGCGAAAGCTGGTTCCTTGTGGAGAAGCACTGGTATAAGCAGTGGGAGGCATACG |
| | TGCAGGGAGGGGACCAGGACTCCAGCACCTTCCCTGGCTGCATCAACAATGCCACACT |
| | CTTTCAAGATGAGATAAACTGGCGCCTCAAGGAGGGACTGGTGGAAGGCGAGGATTAT |
| | GTGCTGCTCCCAGCAGCTGCTTGGCATTACCTGGTCAGCTGGTATGGTCTAGAGCATG |
| | GCCAGCCACCCATTGAACGCAAGGTCATAGAGCTGCCCAACATCCAGAAGGTCGAAGT |
| | GTACCCAGTAGAACTGCTGCTTGTCCGGCACAATGATTTGGGCAAATCTCACACTGTT |
| | CAGTTCAGCCATACCGATTCTATTGGCCTAGTATTGCGCACAGCTCGGGAGCGGTTTC |
| | TGGTGGAGCCCCAGGAAGACACTCGGCTTTGGGCCAAGAACTCAGAAGGCTCTTTGGA |
| | TAGGTTGTATGACACACACATCACGGTTCTCGATGCGGCCCTTGAGACTGGGCAGTTG |
| | ATCATCATGGAGACCCGCAAGAAAGATGGCACTTGGCCCAGCGCACAGCTGCATGTCA |
| | TGAACAACAACATGTCGGAAGAGGATGAGGACTTCAAGGGTCAGCCAGGCATCTGTGG |
| | CCTCACCAATCTGGGCAACACGTGCTTCATGAACTCGGCCCTGCAGTGCCTCAGCAAT |
| | GTGCCACAGCTCACCGAGTACTTCCTCAACAACTGCTACCTGGAGGAGCTCAACTTCC |
| | GCAACCCACTGGGCATGAAGGGTGAGATCGCAGAGGCCTATGCAGACCTGGTGAAGCA |
| | GGCGTGGTCTGGCCACCACCGCTCCATTGTGCCACATGTGTTCAAGAACAAGGTTGGC |
| | CATTTTGCATCCCAATTTCTGGGCTACCAGCAGCATGACTCTCAGGAGCTGCTGTCAT |
| | TCCTCCTGGACGGGCTGCATGAGGACCTTAATCGGGTGAAGAAGAAGGAGTATGTGGA |
| | GCTGTGCGATGCTGCTGGGCGACCGGATCAGGAGGTGGCACAGGAGGCATGGCAAAAC |
| | CACAAACGGCGGAACGATTCTGTGATCGTGGACACTTTCCACGGCCTCTTCAAGTCCA |
| | CGCTGGTGTGCCCCGATTGTGGCAATGTATCTGTGACCTTCGACCCCTTCTGCTACCT |
| | CAGTGTTCCACTGCTTATCAGCCACAAGAGGGTCTTGGAGGTCTTCTTTATCCCCATG |
| | GATCCGCGCCGCAAGCCAGAGCAGCACCGGCTCGTGGTCCCCAAGAAAGGCAAGATCT |
| | CGGATCTATGTGTGGCTCTGTCCAAACACACGGGCATCTCGCCAGAGAGGATGATGGT |
| | GGCTGATGTCTTCAGTCACCGCTTCTATAAGCTCTATCAGCTAGAGGAGCCTCTGAGC |
| | AGCATCTTGGACCGTGATGATATCTTCGTCTATGAGGTGTCAGGTCGCATTGAGGCCA |
| | TTGAGGGCTCAAGAGAGGACATCGTGGTTCCTGTCTACCTGCGGGAGCGCACCCCTGC |
| | CCGTGACTACAACAACTCCTACTACGGCCTGATGCTTTTTGGACACCCCCTCCTGGTA |
| | TCAGTGCCCCGGGACCGCTTCACCTGGGAGGGCCTGTATAACGTCCTGATGTACCGGC |
| | TCTCACGCTACGTGACCAAACCCAACTCAGATGATGAGGACGATGGGGATGAGAAAGA |
| | AGATGACGAGGAGGATAAAGATGACGTCCCTGGGCCCTCAACTGGGGGCAGCCTCCGA |
| | GACCCTGAGCCAGAGCAGGCTGGGCCCAGCTCTGGAGTCACGAACAGGTGCCCGTTCC |
| | TCCTGGACAATTGCCTTGGCACATCTCAGTGGCCCCCAAGGCGACGACGCAAGCAGCT |
| | GTTCACCCTGCAGACGGTGAACTCCAATGGGACCAGCGACCGCACAACCTCCCCTGAA |
| | GAAGTCCATGCCCAGCCGTACATTGCTATCGACTGGGAGCCAGAGATGAAGAAGCGTT |
| | ACTATGACGAGGTAGAGGCTGAGGGCTACGTGAAGCATGACTGCGTCGGGTACGTGAT |
| | GAAGAAGGCTCCCGTGCGGCTGCAGGAGTGCATTGAGCTCTTCACCACTGTGGAGACC |
| | CTGGAGAAGGAAAACCCCTGGTACTGCCCTTCCTGCAAGCAGCACCAGCTGGCAACCA |
| | AGAAGCTGGACCTGTGGATGCTGCCGGAGATTCTCATCATCCACCTGAAACGCTTTTC |
| | CTACACCAAGTTCTCCCGAGAGAAGCTGGACACCCTCGTGGAGTTTCCTATCCGGTCA |
| | GGGGCCAGGGAGAGGATGGCTGGGGGAAGGCAGGGAAAGGAGGGGGTGTACCAGTATT |
| | AACCCTCTCCCCACCCACAGGGACCTGGACTTCTCTGAGTTTGTCATCCAGCCACAGA |
| | ATGAGTCGAATCCGGAGCTGTACAAATATGACCTCATCGCGGTTTCCAACCATTATGG |
| | GGGCATGCGTGATGGACACTACACAACATTTGCCTGCAACAAGGACAGCGGCCAGTGG |
| | CACTACTTTGATGACAACAGCGTCTCCCCTGTCAATGAGAATCAGATCGAGTCCAAGG |
| | CAGCCTATGTCCTCTTCTACCAACGCCAGGACGTGGCGCGACGCCTGCTGTCCCCGGC |
| | CGGCTCATCTGGCGCCCCAGCCTCCCCTGCCTGCAGCTCCCCACCCAGCTCTGAGTTC |
| | ATGGATGTTAATTGAGAGCCCTGGGTCCTGCCACAGAAAAAAAAAAAAAAAAAAA |

| | |
|---|---|
| ORF Start: ATG at 13 | ORF Stop: TAA at 2494 |

| | | |
|---|---|---|
| SEQ ID NO: 84 | 827 aa | MW at 94655.9 kD |

| | |
|---|---|
| NOV26a, | MATVAANPAAAAAAVAAAAAVTEDREPQHEELPGLDSQWRQIENGESGRERPLRAGES |
| CG128021- | |
| 01 Protein | WFLVEKHWYKQWEAYVQGGDQDSSTFPGCINNATLFQDEINWRLKEGLVEGEDYVLLP |
| Sequence | |
| | AAAWHYLVSWYGLEHGQPPIERKVIELPNIQKVEVYPVELLLVRHNDLGKSHTVQFSH |
| | TDSIGLVLRTARERFLVEPQEDTRLWAKNSEGSLDRLYDTHITVLDAALETGQLIIME |
| | TRKKDGTWPSAQLHVMNNNMSEEDEDFKGQPGICGLTNLGNTCFMNSALQCLSNVPQL |
| | TEYFLNNCYLEELNFRNPLGMKGEIAEAYADLVKQAWSGHHRSIVPHVFKNKVGHFAS |
| | QFLGYQQHDSQELLSFLLDGLHEDLNRVKKKEYVELCDAAGRPDQEVAQEAWQNHKRR |
| | NDSVIVDTFHGLFKSTLVCPDCGNVSVTFDPFCYLSVPLLISHKRVLEVFFIPMDPRR |
| | KPEQHRLVVPKKGKISDLCVALSKHTGISPERMMVADVFSHRFYKLYQLEEPLSSILD |
| | RDDIFVYEVSGRIEAIEGSREDIVVPVYLRERTPARDYNNSYYGLMLFGHPLLVSVPR |
| | DRFTWEGLYNVLMYRLSRYVTKPNSDDEDDGDEKEDDEEDKDDVPGPSTGGSLRDPEP |
| | EQAGPSSGVTNRCPFLLDNCLGTSQWPPRRRRKQLFTLQTVNSNGTSDRTTSPEEVHA |
| | QPYIAIDWEPEMKKRYYDEVEAEGYVKHDCVGYVMKKAPVRLQECIELFTTVETLEKE |
| | NPWYCPSCKQHQLATKKLDLWMLPEILIIHLKRFSYTKFSREKLDTLVEFPIRSGARE |
| | RMAGGRQGKEGVYQY |

[0457] Further analysis of the NOV26a protein yielded the following properties shown in Table 26B.

TABLE 26B
Protein Sequence Properties NOV26a

| | |
|---|---|
| PSort | 0.5500 probability located in endoplasmic reticulum |
| analysis: | (membrane); 0.1900 probability located in lysosome |
| | (lumen); 0.1440 probability located in nucleus; 0.1000 |
| | probability located in endoplasmic reticulum (lumen) |
| SignalP | No Known Signal Sequence Predicted |
| analysis: | |

[0458] A search of the NOV26a protein against the Geneseq database, a proprietary database that contains sequences published in patents and patent publications, yielded several homologous proteins shown in Table 26C.

TABLE 26C
Geneseq Results for NOV26a

| | | NOV26a | | |
|---|---|---|---|---|
| | Protein/Organism/ | Residues/ | Identities/ | |
| Geneseq | Length [Patent #, | Match | Similarities for | Expect |
| Identifier | Date] | Residues | the Matched Region | Value |
| AAU31808 | Novel human secreted protein #2299- | 22 . . . 797 | 734/786 (93%) | 0.0 |
| | Homo sapiens, 1024 aa. | 19 . . . 804 | 745/786 (94%) | |
| | [WO200179449-A2, 25 Oct. 2001] | | | |
| AAY70014 | Human Protease and associated protein- | 53 . . . 806 | 368/820 (44%) | 0.0 |
| | 8 (PPRG-8)-Homo sapiens, 952 aa. | 24 . . . 827 | 512/820 (61%) | |
| | [WO200009709-A2, 24 Feb. 2000] | | | |
| AAW54094 | Homo sapiens BE455 sequence-Homo | 634 . . . 807 | 174/174 (100%) | e−102 |
| | sapiens, 290 aa. [WO9812327-A2, | 4 . . . 177 | 174/174 (100%) | |
| | 26 Mar. 1998] | | | |
| AAU82715 | Amino acid sequence of novel human | 85 . . . 502 | 171/455 (37%) | 1e−77 |
| | protease #14-Homo sapiens, 1604 aa. | 521 . . . 969 | 251/455 (54%) | |
| | [WO200200860-A2, 3 Jan. 2002] | | | |
| AAY92344 | Human cancer associated antigen | 106 . . . 521 | 166/442 (37%) | 2e−77 |
| | precursor from clone NY-REN-60- | 18 . . . 452 | 248/442 (55%) | |
| | Homo sapiens, 462 aa. | | | |
| | [WO200020587-A2, 13 Apr. 2000] | | | |

[0459] In a BLAST search of public sequence databases, the NOV26a protein was found to have homology to the proteins shown in the BLASTP data in Table 26D.

TABLE 26D
Public BLASTP Results for NOV26a

| | | NOV25a | | |
|---|---|---|---|---|
| Protein | | Residues/ | Identities/ | |
| Accession | | Match | Similarities for | Expect |
| Number | Protein/Organism/Length | Residues | the Matched Portion | Value |
| P51784 | Ubiquitin carboxyl-terminal hydrolase 11 | 231 . . . 807 | 576/577 (99%) | 0.0 |
| | (EC 3.1.2.15) (Ubiquitin thiolesterase 11) | 1 . . . 577 | 576/577 (99%) | |
| | (Ubiquitin-specific processing protease 11) | | | |
| | (Deubiquitinating enzyme 11)-Homo | | | |
| | sapiens (Human), 690 aa. | | | |
| Q99K46 | Similar to ubiquitin specific protease 11- | 231 . . . 807 | 493/589 (83%) | 0.0 |
| | Mus musculus (Mouse), 699 aa. | 1 . . . 587 | 538/589 (90%) | |
| Q921M8 | Similar to ubiquitous nuclear protein-Mus | 45 . . . 825 | 387/840 (46%) | 0.0 |
| | musculus (Mouse), 915 aa. | 4 . . . 817 | 514/840 (61%) | |
| Q9PWC6 | Ubiquitous nuclear protein-Gallus gallus | 53 . . . 806 | 372/820 (45%) | 0.0 |
| | (Chicken), 950 aa. | 24 . . . 825 | 514/820 (62%) | |
| Q9UNP0 | Deubiquitinating enzyme-Homo sapiens | 53 . . . 806 | 369/820 (45%) | 0.0 |
| | (Human), 952 aa. | 24 . . . 827 | 513/820 (62%) | |

[0460] PFam analysis predicts that the NOV26a protein contains the domains shown in the Table 26E.

TABLE 26E
Domain Analysis of NOV26a

| | | Identities/ | |
|---|---|---|---|
| Pfam | | Similarities for | Expect |
| Domain | NOV26a Match Region | the Matched Region | Value |
| UCH-1 | 266 . . . 297 | 19/32 (59%) | 2.3e−15 |
| | | 31/32 (97%) | |

### Example 27

[0461] The NOV27 clone was analyzed, and the nucleotide and encoded polypeptide sequences are shown in Table 27A.

TABLE 27A
NOV27 Sequence Analysis

| | |
|---|---|
| SEQ ID NO: 85 | 1552 bp |

| | |
|---|---|
| NOV27a, | CAGAAATCTCAGGTCAGAGGCACGGACAGCCTCTGGAGCTCTCGTCTGGTGGGACCAT |
| CG128291- | |
| 01 DNA | GAACTGCCAGCAGCTGTGGCTGGGCTTCCTACTCCCCATGACAGTCTCAGGCCGGGTC |
| Sequence | |
| | CTGGGGCTTGCAGAGGTGGCGCCCGTGGACTACCTGTCACAATATGGGTACCTACAGA |
| | AGCCTCTAGAAGGATCTAATAACTTCAAGCCAGAAGATATCACCGAGGCTCTGAGAGC |
| | TTTTCAGGAAGCATCTGAACTTCCAGTCTCAGGTCAGCTGGATGATGCCACAAGGGCC |
| | CGCATGAGGCAGCCTCGTTGTGGCCTAGAGGATCCCTTCAACCAGAAGACCCTTAAAT |
| | ACCTGTTGCTGGGCCGCTGGAGAAAGAAGCACCTGACTTTCCGCATCTTGAACCTGCC |
| | CTCCACCCTTCCACCCCACACAGCCCGGGCAGCCCTGCGTCAAGCCTTCCAGGACTGG |
| | AGCAATGTGGCTCCCTTGACCTTCCAAGAGGTGCAGGCTGGTGCGGCTGACATCCGCC |
| | TCTCCTTCCATGGCCGCCAAAGCTCGTACTGTTCCAATACTTTTGATGGGCCTGGGAG |
| | AGTCCTGGCCCATGCCGACATCCCAGAGCTGGGCAGTGTGCACTTCGACGAAGACGAG |
| | TTCTGGACTGAGGGGACCTACCGTGGGGTGAACCTGCGCATCATTGCAGCCCATGAAG |
| | TGGGCCATGCTCTGGGGCTTGGGCACTCCCGATATTCCCAGGCCCTCATGGCCCCAGT |
| | CTACGAGGGCTACCGGCCCCACTTTAAGCTGCACCCAGATGATGTGGCAGGGATCCAG |
| | GCTCTCTATGGGCCCCGTGGGAAGACCTATGCTTTCAAGGGGGACTATGTGTGGACTG |
| | TATCAGATTCAGGACCGGGCCCCTTGTTCCGAGTGTCTGCCCTTTGGGAGGGGCTCCC |
| | CGGAAACCTGGATGCTGCTGTCTACTCGCCTCGAACACAATGGATTCACTTCTTTAAG |
| | GGAGACAAGGTGTGGCGCTACATTAATTTCAAGATGTCTCCTGGCTTCCCCAAGAAGC |
| | TGAATAGGGTAGAACCTAACCTGGATGCAGCTCTCTATTGGCCTCTCAACCAAAAGGT |
| | GTTCCTCTTTAAGGGCTCCGGGTACTGGCAGTGGGACGAGCTAGCCCGAACTGACTTC |
| | AGCAGCTACCCCAAACCAATCAAGGGTTTGTTTACGGGAGTGCCAAACCAGCCCTCGG |
| | CTGCTATGAGTTGGCAAGATGGCCGAGTCTACTTCTTCAAGGGCAAAGTCTACTGGCG |
| | CCTCAACCAGCAGCTTCGAGTAGAGAAAGGCTATCCCAGAAATATTTCCCACAACTGG |
| | ATGCACTGTCGTCCCCGGACTATAGACACTACCCCATCAGGTGGGAATACCACTCCCT |
| | CAGGTACGGGCATAACCTTGGATACCACTCTCTCAGCCACAGAAACCACGTTTGAATA |
| | CTGACTGCTCACCCACAGACACAATCTTGGACATTAACCCCTGAGGCTCCACCACCCA |
| | CCCTTTCATTTCCCCCCCAGAAGCCTAAGGCCTAATAGCTGAAT |

| | |
|---|---|
| ORF Start: ATG at 57 | ORF Stop: TGA at 1452 |

| | | |
|---|---|---|
| SEQ ID NO: 86 | 465 aa | MW at 52665.2 kD |

| | |
|---|---|
| NOV27a | [sequence omitted] |
| CG128291- | |
| 01 Protein | AFQEASELPVSGQLDDATRARMRQPRCGLEDRFNQKTLKYLLLGRWRKKHLTFRILNL |
| Sequence | |
| | PSTLPPHTARAALRQAFQDWSNVAPLTPQEVQAGAADIRLSFHGRQSSYCSNTFDGPG |
| | RVLAHADIPELGSVHFDEDEFWTEGTYRGVNLRIIAAHEVGHALGLGHSRYSQALMAP |
| | VYEGYRPHFKLHPDDVAGIQALYGPRGKTYAFKGDYVWTVSDSGPGPLFRVSALWEGL |
| | VFLFKGSGYWQWDELARTDFSSYPKPIKGLFTGVPNQPSAAMSWQDGRVYFFKGKVYW |
| | RLNQQLRVEKGYPRNISHNWMHCRPRTIDTTRSGGNTTPSGTGITLDTTLSATETTFE |
| | Y |

[0462] Further analysis of the NOV27a protein yielded the following properties shown in Table 27B.

TABLE 27B
Protein Sequence Properties NOV27a

| | |
|---|---|
| PSort | 0.8650 probability located in lysosome (lumen); 0.3700 |
| analysis: | probability located in outside; 0.2801 probability located |
| | in microbody (peroxisome); 0.1000 probability located in |
| | endoplasmic reticulum (membrane) |
| SignalP | Cleavage site between residues 19 and 20 |
| analysis: | |

[0463] A search of the NOV27a protein against the Geneseq database, a proprietary database that contains sequences published in patents and patent publication, yielded several homologous proteins shown in Table 27C.

TABLE 27C
Geneseq Results for NOV27a

| | | NOV27a | | |
|---|---|---|---|---|
| | Protein/Organism/ | Residues/ | Identities/ | |
| Geneseq | Length [Patent #, | Match | Similarities for | Expect |
| Identifier | Date] | Residues | the Matched Region | Value |
| AAU78837 | Human matrix metalloproteinase 19 | 1 . . . 465 | 465/508 (91%) | 0.0 |
| | (MMP-19)-Homo sapiens, 508 aa. | 1 . . . 508 | 465/508 (91%) | |
| | [WO200211530-A1, 14 Feb. 2002] | | | |
| AAB84620 | Amino acid sequence of matrix | 1 . . . 465 | 465/508 (91%) | 0.0 |
| | metalloproteinase-19-Homo sapiens, | 1 . . . 308 | 465/508 (91%) | |
| | 508 aa. [WO200149309-A2, | | | |
| | 12 Jul. 2001] | | | |
| AAE10427 | Human matrix metalloprotinase-18P | 1 . . . 465 | 465/508 (91%) | 0.0 |
| | (MMP-18P) protein-Homo sapiens, | 1 . . . 508 | 465/508 (91%) | |
| | 508 aa. [WO200166766-A2, | | | |
| | 13 Sep. 2001] | | | |
| AAW16622 | Human metalloprotease MPRS-Homo | 1 . . . 465 | 465/508 (91%) | 0.0 |
| | sapiens, 508 aa. [WO9719178-A2, | 1 . . . 508 | 465/508 (91%) | |
| | 29 May 1997] | | | |
| AAW34075 | Human liver derived metalloprotease- | 1 . . . 465 | 465/508 (91%) | 0.0 |
| | Homo sapiens, 508 aa. [WO9740157- | 1 . . . 508 | 465/508 (91%) | |
| | A1, 30 Oct. 1997] | | | |

[0464] In a BLAST search of public sequence databases, the NOV27a protein was found to have homology to the proteins shown in the BLASTP data in Table 27D.

TABLE 27D
Public BLASTP Results for NOV27a

| | | NOV27a | | |
|---|---|---|---|---|
| Protein | | Residues | Identities | |
| Accession | | Match | Similarities for the | Expect |
| Number | Protein/Organism | Residues | Matched Portion | Value |
| Q99542 | Matrix metalloproteinase-19 precursor | 1 . . . 465 | 465/508 (91%) | 0.0 |
| | (EC 3.4.24.-) (MMP-19) (Matrix | 1 . . . 508 | 465/508 (91%) | |
| | Homo sapiens (Human), 508 aa. | | | |
| Q9JH10 | Matrix metalloproteinase-19 precursor | 1 . . . 464 | 373/507 (73%) | 0.0 |
| | (EC 3.4.24.-) (MMP-19) (Matrix | 1 . . . 506 | 411/507 (80%) | |
| | metalloproteinase RASI) - Mus | | | |
| | musculus (Mouse), 527 aa. | | | |
| Q9GTK3 | Matrix metalloproteinase I - Drosophila | 20 . . . 449 | 180/503 (35%) | 3e−69 |
| | melanogaster (Fruit fly), 567 aa. | 44 . . . 527 | 242/503 (47%) | |
| AAM48434 | RE62222p - Drosophila melanogaster | 20 . . . 449 | 179/503 (35%) | 5e−69 |
| | (Fruit fly), 584 aa. | 18 . . . 501 | 242/503 (47%) | |
| Q9W122 | CG4859 protein - Drosophila | 31 . . . 449 | 175/485 (36%) | 2e−68 |
| | melanogaster (Fruit fly), 568 aa. | 20 . . . 485 | 235/485 (48%) | |

[0465] PFam analysis predicts that the NOV27a protein contains the domains shown in the Table 27E.

TABLE 27E
Domain Analysis of NOV27a

| | NOV27a | Identities/Similarities | Expect |
|---|---|---|---|
| Pfam Domain | Match Region | for the Matched Region | Value |
| Peptidase₋M10 | 31 . . . 197 | 67/176 (38%) | 1.7e−26 |
| | | 119/176 (68%) | |
| Hemopexin | 251 . . . 292 | 20/50 (40%) | 0.0017 |
| | | 30/50 (60%) | |
| Hemopexin | 294 . . . 335 | 15/50 (30%) | 0.00014 |
| | | 34/50 (68%) | |
| Hemopexin | 337 . . . 384 | 17/50 (34%) | 2e−08 |
| | | 36/50 (72%) | |
| Hemopexin | 386 . . . 429 | 20/50 (40%) | 1.1e−11 |
| | | 34/50 (68%) | |

### Example 28

[0466] The NOV28 clone was analyzed, and the nucleotide and encoded polypeptide sequences are shown in Table 28A.

TABLE 28A
NOV28 Sequence Analysis

| | |
|---|---|
| SEQ ID NO: 87 | 4487 bp |

| | |
|---|---|
| NOV28a, | CCGCGTCCGCGGACGCGTGGGGGCGAGGGCCGCTGGGGCCGCGAAGTGGGGCGGCCGG |
| CG128380- | |
| 01 DNA | GTGGGCTACGAGCCGGGTCTGGGCTGAGGGGCGCGCCTTCGCCGTGGACCCCAGCCCG |
| Sequence | |
| | GCAACGGGAAGGCGAGCTCTCCTCCACCGTCCAAAGTAAACTTTGCCGCTCCTTCCGC |
| | GGCGCTCCCGAGTCCTCGCCGCCGCCGGGCCGCCGCAGTCCGCGAAGAGCCGTCCTGC |
| | GTCAGGGCCTCCTTCCCTGCCCCGGCGCGGGGCCACTGCGCCATGGACGCCACAGCAC |
| | TGGAGCGGGACGCTGTGCAGTTCGCCCGTCTGGCGGTTCAGCGCGACCACGAAGGCCG |
| | CTACTCCGAGGCGGTGTTTTATTACAAGGAAGCTGCACAAGCCTTAATTTATGCTGAG |
| | ATGGCAGGATCAAGCCTAGAAAATATTCAAGAAAAAATAACTGAGTATCTGGAAAGAG |
| | TTCAAGCTCTACATTCAGCAGTTCAGTCAAAGAGTGCTGATCCTTTGAAGTCAAAACA |
| | TCAGTTGGACTTAGAGCGTGCTCATTTCCTTGTTACACAAGCTTTTGATGAAGATGAA |
| | AAAGAGAATGTTGAAGATGCTATAGAATTGTACACAGAAGCTGTGGATCTCTGTCTGA |
| | AAACATCTTATGAAACTGCTGATAAAGTCCTGCAAAATAAACTGAAACAGTTGGCTCG |
| | ACAGGCACTAGACAGAGCAGAAGCGCTGAGTGAGCCTTTGACCAAGCCAGTTGGCAAA |
| | ATCAGTTCAACAAGTGTTAAGCCAAAGCCACCTCCAGTGAGAGCACATTTTCCACTGG |
| | GCGCTAATCCCTTCCTTGAAAGACCTCAGTCATTTATAAGTCCTCAGTCATGTGATGC |
| | ACAAGGACAGAGATACACAGCAGAAGAAATAGAAGTACTCAGGACAACATCAAAAATA |
| | AATGGTATAGAATATGTTCCTTTCATGAATGTTGACCTGAGAGAACGTTTTGCCTATC |
| | CAATGCCTTTCTGTGATAGATGGGGCAAGCTACCATTATCACCTAAACAAAAAACTAC |
| | ATTTTCCAAGTGGGTACGACCAGAAGACCTCACCAACAATCCTACAATGATATATACT |
| | GTGTCCAGTTTTAGCATAAAGCAGACAATAGTATCGGATTGCTCCTTTGTGGCATCAC |
| | TGGCCATCAGTGCAGCTTATGAAAGACGTTTTAATAAGAAGTTAATTACCGGCATAAT |
| | TTACCCTCAAAACAAGGATGGTGAACCAGAATACAATCCATGTGGGAAGTATATGGTA |
| | AAACTTCACCTCAATGGTGTCCCAAGAAAGGTGATAATTGATGACCAGTTACCTGTTG |
| | ATCACAAGGGAGAATTGCTCTGTTCTTATTCCAACAACAAAAGTGAATTATGGGTTTC |
| | TCTCATAGAAAAAGCATACATGAAAGTCATGGGAGGATATGATTTTCCAGGATCCAAC |
| | TCCAATATTGATCTTCATGCACTGACTGGCTGGATACCAGAAAGAATTGCTATGCATT |
| | CAGATAGCCAAACTTTCAGTAAGGATAATTCTTTCAGAATGCTTTATCAAAGATTTCA |
| | CAAAGGAGATGTCCTCATCACTGCGTCAACTGGAATGATGACAGAAGCTGAAGGAGAG |
| | AAGTGGGGTCTGGTTCCCACACACGCATATGCTGTTTTGGATATTAGAGAGTTCAAGG |
| | GGCTGCGATTTATCCAGTTGAAAAATCCTTGGAGTCATTTACGTTGGAAAGGAAGATA |
| | CAGTGAAAATGATGTAAAAAACTGGACTCCAGAGTTGCAAAAGTATTTAAACTTTGAT |
| | CCCCGAACAGCTCAGAAAATAGACAACGGAATATTTTGGATTTCCTGGGATGATCTCT |
| | GCCAGTATTATGATGTGATTTATTTGAGTTGGAATCCAGGTCTTTTTAAAGAATCAAC |
| | ATGTATTCACAGTACTTGGGATGCTAAGCAAGGACCTGTGAAAGATGCCTATAGCCTG |
| | GCCAACAACCCCCAGTACAAACTGGAGGTGCAGTGTCCACAGGGGGGTGCTGCAGTTT |
| | GGGTTTTGCTTAGTAGACACATAACAGACAAGGATGATTTTGCGAATAATCGAGAATT |
| | TATCACAATGGTTGTATACAAGACTGATGGAAAAAAAGTTTATTACCCAGCTGACCCA |
| | CCTCCATACATTGATGGAATTCGAATTAACAGCCCTCATTATTTGACTAAGATAAAGC |
| | TGACCACACCTGGCACCCATACCTTTACATTAGTGGTTTCTCAATATGAAAAACAGAA |
| | CACAATCCATTACACGGTTCGGGTATATTCAGCATGCAGCTTTACTTTTTCAAAGATT |
| | CCTTCACCATACACCTTATCAAAACGGATTAATGGAAAGTGGAGTGGTCAGAGTGCTG |
| | GAGGATGTGGAAATTTCCAAGAGACTCACAAAAATAACCCCATCTACCAATTCCATAT |
| | AGAAAAGACTGGGCCGTTACTGATTGAGCTACGAGGACCAAGGAGATCCTGGTCCCCA |
| | TGGCTTTCTGAGGAAATCTAGTGGTGACTATAGGTGTGGGTTTTGCTACCTGGAATTA |
| | GAAATATACCTTCTGGGATCTTCAATATCATTCCTAGTACCTTTTTGCCTAAACAAGA |
| | AGGACCTTTTTTCTTGGACTTTAATAGTATTATCCCCATCAAGATCACACAACTTCAG |
| | TGATGGAGAAATCTCAAGTTACTGGCTTTTATACTTACCAAACATCAGTTCTTCAAAT |
| | AAGGACGCAAATCTTCAGGACAGTAAGCAGAACAATCAGAATGGAATTAAATCTCTAA |
| | AAACGTGTTACAGTGGAATCTGGTGCTTGTCAGGGTGTTTGGTAAGAACTGTATATAG |
| | TCAGAATTACCTAAATCACCTAGAGGTACCGTTTACATGGTTTTGTGTATATAGAGTT |
| | GGCTTGCATTTTAGGGGCCATTTTGTATAAAAAGTGCATATGATTAAAATTAGACTCA |
| | GTCATCACTGTGAGATGCCTTTGCTAAGAGGATAAAGGAACTGAGACCAGATGAGAAA |
| | AAGAAAGGATATAGATTCCTTGAGTGGAATAGTGGGCTAGATTAATATACCGAAATAT |
| | TTCCATTGTTTCCCTTTTTTGCAGAGCATGTGGAAGTTAAACCTGCTTGATTCTACTA |
| | TACATCTTGGGCAACTAGTTACCAAATGAATTGTGCCACCATAACTGATTTTAATTTT |
| | GCATTATTTATGATTTTAAAATATTTGTTGCCCAGGTGTTATGAAAGAATAAACCTTT |
| | TAAGTATAGACTACCTTAGCATGAAGATGCTCATGCCTAAGAATGAAAATTGTTGAGG |
| | TTATCTCCCATTCAATCATGTAGCAAGAACTTAAAGAAATTCACTACTGCAGTTTTTA |
| | TTTTTAAAAAACAGTAATTGAGATATTGAAGACATTACAATTTAGTTTGTGTGGTCTT |
| | TTTTTAAATTGCTGTATCGTTCAGTCTCTTGTGGCAATAGCACTTTGAAGAAAATAGA |
| | GAATTTAATATATGGTGATTGGGATATGTAGCATTCAAAAAAAGTGAATTGCCAAGAT |
| | ACTGGTGTCATGTAAATTCCCACTTTACATAAAAACCCATCAGGACAGAATGATGCTC |
| | AATATTTTAAAATTCTAAAAATAGGGTGGGATTTTTCATTGTCTCTACTTTATAATTA |
| | TCAAAACTTATTTTGTATTGCTACTACCTTAAATTGAAATAAAATGTTTATACTTACG |
| | GATATTGCATAGTTTAAGTTAGATTTATTGAAAGATTTCATCTGTCGTGTTTCATGTA |
| | AATGAGAACAGATTATTTGCATGAAAATATATACTTCAACAAAAATCTGTTCTTTAAC |
| | AGAGTAGTGGTAGATTATTACACTAATGAGATTTCACTTTGGTAAATACTTCATGCTT |
| | TCAGTTTTAGCCTATTAATTTTAGGTGGACAAATTTAACAAGTTTTCTGTTACTTTTT |
| | AAAAAGAAAAAATCCAGAACATAAGAACTATATTATGAACACATGATTTGAACCTGTT |
| | GTGGTAAAGATCTTGTACAGGATGCAAACTAAAAACCTAATCCCTGCCATCAAATTTA |
| | TTAGAAGAGACCTATATATGAACAACTTAAAGGCACTGATTTCTATAATAGAGCTCTA |
| | AAAACATGCCACCAGTGTATGAATAAGGGAAAGATTAATTTTGGCTGGACCAATATAA |
| | AAAATTGTATTTGAAGAATTGATACTTTAACTTGGACCTTGAAGGTAAAGCTTCAAAA |
| | GACAGGTTACTGACCATTGAGTGTTTACTATGTACCCAATGTGTATATTTTTCTTTTT |
| | AATCTTCCCAATAGCTGAATAAAGTATAGATACTATTATTTGTACTTCTTACAATTGA |
| | GGAAATAAGCCTAAGAGATTAAAAGATTTTGCCCAGGGTTCACAAGCCTTCTTCCCTG |
| | AGCCCTGATTGAGCTGCTGTGTGTGTCTAATGGCACCCACAGTCACGGCCGTCTAGTC |
| | GAGGGAGGGACAAGATCTAGA |

| | |
|---|---|
| ORF Start: ATG at 275 | ORF Stop: TAG at 2513 |

| | | |
|---|---|---|
| SEQ ID NO: 88 | 746 aa | MW at 85355.1 kD |

| | |
|---|---|
| NOV28a | MDATALERDAVQFARLAVQRDHFGRYSEAVFYYKEAAQALIYAEMAGSSLENIQEKIT |
| CG128380- | |
| 01 Protein | EYLERVQALHSAVQSKSADPLKSKHQLDLERAHFLVTQAFDEDFKENVEDAIELYTEA |
| Sequence | |
| | VDLCLKTSYETADKVLQNKLKQLARQALDRAEALSEPLTKPVGKISSTSVKPKPPPVR |
| | AHFPLGANPFLERPQSFISPQSCDAQGQRYTAEEIEVLRTTSKINGIEYVPFMNVDLR |
| | ERFAYPMPFCDRWGKLRLSPKQKTTFSKWVRPEDLTNNPTMIYTVSSFSIKQTIVSDC |
| | SFVASLAISAAYERRFNKKLITGIIYPQNKDGEPEYNPCGKYMVKLHLNGVPRKVIID |
| | DQLPVDHKGELLCSYSNNKSELWVSLIEKAYMKVMGGYDFPGSNSNIDLHALTGWIPE |
| | RIAMHSDSQTFSKDNSFRMLYQRFHKGDVLITASTGMMTEAEGEKWGLVPTHAYAVLD |
| | IREFKGLRFIQLKNPWSHLRWKGRYSENDVKNWTPELQKYLNFDPRTAQKIDNGIFWI |
| | SWDDLCQYYDVIYLSWNPGLFKESTCIHSTWDAKQGPVKDAYSLANNPQYKLEVQCPQ |
| | GGAAVWVLLSRHITDKDDFANNREFITMVVYKTDGKKVYYPADPPPYIDGIRINSPHY |
| | LTKIKLTTPGTHTFTLVVSQYEKQNTIHYTVRVYSACSFTFSKIPSPYTLSKRINGKW |
| | SGQSAGGCGNFQETHKNNPIYQFHIEKTGPLLIELRGPRRSWSPWLSEEI |

[0467] Further analysis of the NOV28a protein yielded the following properties shown in Table 28B.

TABLE 28B
Protein Sequence Properties NOV28a

| | |
|---|---|
| PSort | 0.5736 probability located in mitochondrial matrix space; |
| analysis: | 0.5077 probability located in microbody (peroxisome); 0.2872 |
| | probability located in mitochondrial inner membrane; 0.2872 |
| | probability located in mitochondrial intermembrane space |
| SignalP | No Known Signal Sequence Predicted |
| analysis: | |

[0468] A search of the NOV28a protein against the Geneseq database, a proprietary database that contains sequences published in patents and patent publication, yielded several homologous proteins shown in Table 28C.

TABLE 28C
Geneseq Results for NOV28a

| | | NOV28a | | |
|---|---|---|---|---|
| | Protein/Organism/ | Residues/ | Identities/ | |
| Geneseq | Length [Patent #, | Match | Similarities for | Expect |
| Identifier | Date] | Residues | the Matched Region | Value |
| AAB67649 | Amino acid sequence of a human calpain | 1 . . . 736 | 735/736 (99%) | 0.0 |
| | protease designated 26176-Homo | 1 . . . 736 | 736/736 (99%) | |
| | sapiens, 813 aa. (WO200118216-A2, | | | |
| | 15 Mar. 2001] | | | |
| AAG04040 | Human secreted protein, SEQ ID NO. | 608 . . . 746 | 138/139 (99%) | 5e−80 |
| | 8121-Homo sapiens, 139 aa. | 1 . . . 139 | 138/139 (99%) | |
| | [EP1033401-A2, 6 Sep. 2000] | | | |
| ABB05604 | Mutant Aspergillus oryzae DEBY10.3 | 205 . . . 734 | 187/556 (33%) | 8e−74 |
| | protein SEQ ID NO: 17-Aspergillus | 104 . . . 632 | 279/556 (49%) | |
| | oryzae, 854 aa. [U.S. Pat. No. 6323002- | | | |
| | B1, 27 Nov. 2001] | | | |
| AAY97155 | PalB polypeptide of Aspergillus oryzae- | 205 . . . 734 | 187/556 (33%) | 8e−74 |
| | Aspergillus oryzae, 854 aa. | 104 . . . 632 | 279/556 (49%) | |
| | [WO200046375-A2, 10 Aug. 2000] | | | |
| AAY39872 | A. oryzae DEBY10.3 locus protein | 205 . . . 734 | 187/556 (33%) | 8e−74 |
| | sequence-Aspergillus oryzae, 854 aa. | 104 . . . 632 | 279/556 (49%) | |
| | [U.S. Pat. No. 5958727-A, 28 Sep. 1999] | | | |

[0469] In a BLAST search of public sequence databases, the NOV28a protein was found to have homology to the proteins shown in the BLASTP data in Table 28D.

TABLE 28D
Public BLASTP Results for NOV28a

| | | NOV28a | | |
|---|---|---|---|---|
| Protein | | Residues/ | Identities/ | |
| Accession | | Match | Similarities for | Expect |
| Number | Protein/Organism/Length | Residues | the Matched Portion | Value |
| Q9Y6W3 | PalBH (EC 3.4.22.17)-Homo | 1 . . . 736 | 735/736 (99%) | 0.0 |
| | sapiens (Human), 813 aa | 1 . . . 736 | 736/736 (99%) | |
| Q9R1S8 | PalBH (EC 3.4.22.17)-Mus | 1 . . . 736 | 704/736 (95%) | 0.0 |
| | musculus (Mouse), 813 aa. | 1 . . . 736 | 719/736 (97%) | |
| Q9Z0P9 | Capn7-Mus musculus (Mouse), | 45 . . . 736 | 661/692 (95%) | 0.0 |
| | 769 aa. | 1 . . . 692 | 675/692 (97%) | |
| Q22143 | T04A8.16 protein- | 1 . . . 698 | 310/711 (43%) | e−167 |
| | Caenorhabditis elegans, 805 aa. | 1 . . . 701 | 435/711 (60%) | |
| Q9Y6Z8 | Calpain-like protease PALBORY | 205 . . . 734 | 187/556 (33%) | 2e−73 |
| | Aspergillus oryzae, 854 aa. | 104 . . . 632 | 279/556 (49%) | |

[0470] PFam analysis predicts that the NOV28a protein contains the domains shown in the Table 28E.

TABLE 28E
Domain Analysis of NOV28a

| | | Identities/ | |
|---|---|---|---|
| Pfam | | Similarities for | Expect |
| Domain | NOV28a Match Region | the Matched Region | Value |
| Peptidase_C2 | 231 . . . 537 | 82/353 (23%) | 2.4e−15 |
| | | 177/353 (50%) | |

### Example 29

[0471] The NOV29 clone was analyzed, and the nucleotide and encoded polypeptide sequences are shown in Table 29A.

TABLE 29A
NOV29 Sequence Analysis

| | |
|---|---|
| SEQ ID NO: 89 | 1323 bp |

| | |
|---|---|
| NOV29a, | ATGAGCAACTCCGTTCCTCTGCTCTGTTTCTGGAGCCTCTGCTATTGCTTTGCTGCGG |
| CG128439- | |
| 02 DNA | GGAGCCCCGTACCTTTTGGTCCAGAGGGACGGCTGGATGATAAGCTCCACAAACCCAA |
| Sequence | |
| | AGCTACACAGACTGAGGTCAAACCATCTGTGAGGTTTAACCTCCGCACCTCCAAGGAC |
| | CCAGAGCATGAAGGATGCTACCTCTCCGTCGGCCACAGCCAGCCCTTAGAAGACTGCA |
| | GTTTCAACATGACAGCTAAAACCTTTTTCATCATTCACGGATGGACGGAGAAGGACGA |
| | TTTTTCTCTCGGGAATGTCCACTTGATCGGCTACAGCCTCGGAGCGCACGTGGCCGGG |
| | TATGCAGGCAACTTCGTGAAAGGAACGGTGGGCCGAATCACAGGTTTGGATCCTGCCG |
| | GGCCCATGTTTGAAGGGGCCGACATCCACAAGAGGCTCTCTCCGGACGATGCAGATTT |
| | TGTGGATGTCCTCCACACCTACACGCGTTCCTTCGGCTTGAGCATTGGTATTCAGATG |
| | CCTGTGGGCCACATTGACATCTACCCCAATGGGGGTGACTTCCAGCCAGGCTGTGGAC |
| | TCAACGATGTCTTGGGATCAATTGCATATGGAACAATCACAGAGGTGGTAAAATGTGA |
| | GCATGAGCGAGCCGTCCACCTCTTTGTTGACTCTCTGGTGAATCAGGACAAGCCGAGT |
| | TTTGCCTTCCAGTGCACTGACTCCAATCGCTTCAAAAAGGGGATCTGTCTGAGCTGCC |
| | GCAAGAACCGTTGTAATAGCATTGGCTACAATGCCAAGAAAATGAGGAACAAGAGGAA |
| | CAGCAAAATGTACCTAAAAACCCGGGCAGGCATGCCTTTCAGAGTTTACCATTATCAG |
| | ATGAAAATCCATGTCTTCAGTTACAAGAACATGGGAGAAATTGAGCCCACCTTTTACG |
| | TCACCCTTTATGGCACTAATGCAGATTCCCAGACTCTGCCACTGGAAATAGTGGAGCG |
| | GATCGAGCAGAATGCCACCAACACCTTCCTGGTCTACACCGAGGAGGACTTGGGAGAC |
| | CTCTTGAAGATCCAGCTCACCTGGGAGGGGGCCTCTCAGTCTTGGTACAACCTGTGGA |
| | AGGAGTTTCGCAGCTACCTGTCTCAACCCCGCAACCCCGGACGGGAGCTGAATATCAG |
| | GCGCATCCGGGTGAAGTCTGGGGAAACCCAGCGGAAACTGACATTTTGTACAGAAGAC |
| | CCTGAGAACACCAGCATATCCCCAGGCCGGGAGCTCTGGTTTCGCAAGTGTCGGGATG |
| | GCTGGAGGATGAAAAACGAAACCAGTCCCACTGTGGAGCTTCCCTGA |

| | |
|---|---|
| ORF Start: ATG at 1 | ORF Stop: TGA at 1321 |

| | | |
|---|---|---|
| SEQ ID NO:90 | 440 aa | MW at 49902.3 kD |

| | |
|---|---|
| NOV29a, | MSNSVPLLCFWSLCYCFAAGSPVPFGPEGRLEDKLHKPKATQTEVKPSVRFNLRTSKD |
| CG128439- | |
| 02 Protein | PEHEGCYLSVGHSQPLEDCSFNMTAKTFFIIHGWTEKDDFSLGNVHLIGYSLGAHVAG |
| Sequence | |
| | YAGNFVKGTVGRITGLDPAGPMFEGADIHKRLSPDDADFVDVLHTYTRSFGLSIGIQM |
| | PVGHIDIYPNGGDFQPGCGLNDVLGSIAYGTITEVVKCEHERAVHLFVDSLVNQDKPS |
| | FAFQCTDSNRFKKGICLSCRKNRCNSIGYNAKKMRNKRNSKMYLKTRAGMPFRVYHYQ |
| | MKIHVFSYKNMGEIEPTFYVTLYGTNADSQTLPLEIVERIEQNATNTFLVYTEEDLGD |
| | LLKIQLTWEGASQSWYNLWKEFRSYLSQPRNPGRELNIRRIRVKSGETQRKLTFCTED |
| | PENTSISPGRELWFRKCRDGWRMKNETSPTVELP |

| | |
|---|---|
| SEQ ID NO 91 | 608 bp |

| | |
|---|---|
| NOV29b, | ATGAGCAACTCCGTTCCTCTGCTCTGTTTCTGGAGCCTCTGCTATTGCTTTGCTGCGG |
| 171826603 | |
| DNA | GGAGCCCCGTACCTTTTGGTCCAGAGGGACGGCTGGAAGATAAGCTCCACAAACCCAA |
| Sequence | |
| | AGCTACACAGACTGAGGTCAAACCATCTGTGAGGTTTAACCTCCGCACCTCCAAGGAC |
| | CCAGAGCATGAAGGATGCTACCTCTCCGTCGGCCACAGCCAGCCCTTAGAAGACTGCA |
| | GTTTCAACATGACAGCTAAAACCTTTTTCATCATTCACGGATGGACGGAGAAGGACGA |
| | TTTTTCTCTCGGGAATGTCCACTTGATCGGCTACAGCCTCGGAGCGCACGTGGCCGGG |
| | TATGCAGGCAACTTCGTGAAAGGAACGGTGGGCCGAATCACAGGTTTGGATCCTGCCG |
| | GGCCCATGTTTGAAGGGGCCGACATCCACAAGAGGCTCTCTCCGGACGATGCAGATTT |
| | TGTGGATGTCCTCCACACCTACACGCGTTCCTTCGGCTTGAGCATTGGTATTCAGATG |
| | CCTGTGGGCCACATTGACATCTACCCCAATGGGGGTGACTTCCAGCCAGGCTGTGGAC |
| | TCAACGATGTCTTGGGATCAATTGCCTA |

| | |
|---|---|
| ORF Start: ATG at 1 | ORF Stop: at 607 |

| | | |
|---|---|---|
| SEQ ID NO:92 | 202 aa | MW at 21878.6 kD |

| | |
|---|---|
| NOV29b, | MSNSVPLLCFWSLCYCFAAGSPVRFGPEGRLEDKLHKPKATQTEVKPSVRFNLRTSKD |
| 171826603 | |
| Protein | PEHEGCYLSVGHSQPLEDCSFNMTAKTFFIIHGWTEKDDFSLGNVHLIGYSLGAHVAG |
| Sequence | |
| | YAGNFVKGTVGRITGLDPAGPMFEGADIHKRLSPDDADFVDVLHTYTRSFGLSIGIQM |
| | PVGHIDIYPNGGDFQPGCGLNDVLGSIA |

[0472] Sequence comparison of the above protein sequences yields the following sequence relationships shown in Table 29B.

TABLE 29B
Comparison of NOV29a against NOV29b

| | | Identities/ |
|---|---|---|
| Protein | NOV29a Residues/ | Similarities for |
| Sequence | Match Residues | the Matched Region |
| NOV29b | 1 . . . 202 | 202/202 (100%) |
| | 1 . . . 202 | 202/202 (100%) |

[0473] Further analysis of the NOV29a protein yielded the following, properties shown in Table 29C.

TABLE 29C
Protein Sequence Properties NOV29a

| | |
|---|---|
| PSort | 0.3700 probability located in outside; 0.1900 probability |
| analysis: | located in lysosome (lumen); 0.1800 probability located in |
| | nucleus; 0.1213 probability located in microbody |
| | (peroxisome) |
| SiginalP: | Cleavage site between residues 21 and 22 |
| analysis: | |

[0474] A search of the NOV29a protein against the Geneseq database, a proprietary database that contains sequences published in patents and patent publication, yielded several homologous proteins shown in Table 29D.

TABLE 29D
Geneseq Results for NOV29a

| | | NOV29a | | |
|---|---|---|---|---|
| | Protein/Organism/ | Residues/ | Identities/ | |
| Geneseq | Length [Patent #, | Match | Similarities for | Expect |
| Identifier | Date] | Residues | the Matched Region | Value |
| AAO14635 | Human lipase endothelial (LIPG) | 1 . . . 440 | 431/500 (86%) | 0.0 |
| | protein-Homo sapiens, 500 aa. | 1 . . . 500 | 435/500 (86%) | |
| | [WO200216397-A2, 28 Feb. 2002] | | | |
| AAB19178 | Human LIPG, a triacylglycerol lipase | 1 . . . 440 | 431/500 (86%) | 0.0 |
| | enzyme designated LLGXL-Homo | 1 . . . 500 | 435/500 (86%) | |
| | sapiens, 500 aa. [WO200057837-A2, | | | |
| | 5 Oct. 2000] | | | |
| AAY23759 | Human endothelial cell lipase protein | 1 . . . 440 | 431/500 (86%) | 0.0 |
| | sequence-Homo sapiens, 500 aa. | 1 . . . 500 | 435/500 (86%) | |
| | [WO9932611-A1, 1 Jul. 1999] | | | |
| AAW59792 | Amino acid sequence of lipase like | 1 . . . 440 | 431/500 (86%) | 0.0 |
| | protein LLGXL-Homo sapiens, | 1 . . . 500 | 435/500 (86%) | |
| | 500 aa. [WO9824888-A2, | | | |
| | 11 Jun. 1998] | | | |
| AAY23760 | Mouse endothelial cell lipase protein | 1 . . . 439 | 341/499 (68%) | 0.0 |
| | sequence-Mus sp, 500 aa. | 1 . . . 499 | 383/499 (76%) | |
| | [WO9932611-A1, 1 Jul. 1999] | | | |

[0475] In a BLAST search of public sequence databases, the NOV29a protein was found to have homology to the proteins shown in the BLASTP data in Table 29E.

TABLE 29E
Public BLASTP Results for NOV29a

| | | NOV29a | | |
|---|---|---|---|---|
| Protein | | Residues/ | Identities/ | |
| Accession | | Match | Similarities for | Expect |
| Number | Protein/Organism/Length | Residues | the Matched Portion | Value |
| Q9Y5X9 | Endothelial lipase-Homo sapiens | 1 . . . 440 | 431/500 (86%) | 0.0 |
| | (Human), 500 aa. | 1 . . . 500 | 435/500 (86%) | |
| QSVDU2 | Lipase, endothelial-Mus | 1 . . . 439 | 343/499 (68%) | 0.0 |
| | musculus (Mouse), 500 aa. | 1 . . . 499 | 384/499 (76%) | |
| Q9WVG5 | Endothelial lipase-Mus | 1 . . . 439 | 341/499 (68%) | 0.0 |
| | musculus (Mouse), 500 aa. | 1 . . . 499 | 383/499 (76%) | |
| Q98U13 | Lipoprotein lipase-Pagrus major | 94 . . . 435 | 187/347 (53%) | e−107 |
| | (Red sea bream) (Chrysophrys | 160 . . . 503 | 252/347 (71%) | |
| | major), 511 aa. | | | |
| Q98U12 | Lipoprotein lipase-Pagrus major | 94 . . . 439 | 188/351 (53%) | e−106 |
| | (Red sea bream) (Chrysophrys | 160 . . . 507 | 253/351 (71%) | |
| | major), 510 aa. | | | |

[0476] PFam analysis predicts that the NOV29a protein contains the domains shown in the Table 29F.

TABLE 29F
Domain Analysis of NOV29a

| | | Identities/ | |
|---|---|---|---|
| Pfam | NOV29a | Similarities for | Expect |
| Domain | Match Region | the Matched Region | Value |
| Lipase | 21 . . . 284 | 114/379 (30%) | 9.4e−71 |
| | | 209/379 (55%) | |
| Chitin_synth | 361 . . . 370 | 6/10 (60%) | 0.85 |
| | | 9/10 (90%) | |
| PLAT | 287 . . . 423 | 26/147 (18%) | 4.2e−26 |
| | | 110/147 (75%) | |

### Example 30

[0477] The NOV30 clone was analyzed, and the nucleotide and encoded polypeptide sequences are shown in Table 30A.

TABLE 30A
NOV30 Sequence Analysis

| | |
|---|---|
| SEQ ID NO: 93 | 3067 bp |

| | |
|---|---|
| NOV30a, | AAGGCAATTAAGGCGCCCATTTCAGAAGAGTTACAGCCGTGAAAATTACTCAGCAGTG |
| CG128489- | |
| 01 DNA | CAGTTGGCTGAGAAGAGGAAAAAAGGTCAGGTTGTAAAGCTTTTTATTTTTCCATTTT |
| Sequence | |
| | CTAAGAGAAATTCATCATTGGAACTTGTAAAGTGGCCCAAGAGTGGCTGTAATTTGGG |
| | CCATTATAGCAGGTATGGGTGGCGTCTCTCAGCAAAGCTGACTGACTGACTGATGAGT |
| | GCTGTTTGCAATGACCTCCGCTGGAACATAATGAGAGCGCTCGCTGTGCTGTCTGTCA |
| | CGCTGGTTATGGCCTGCACAGAAGCCTTCTTCCCCTTCATCTCGAGAGGGAAAGAACT |
| | CCTTTGGGGAAAGCCTGAGGAGTCTCGTGTCTCTAGCGTCTTGGAGGAAAGCAAGCGC |
| | CTGGTGGACACCGCCATGTACGCCACGATGCAGAGAAACCTCAAGAAAAGAGGAATCC |
| | TTTCTCCAGCTCAGCTTCTGTCTTTTTCCAAACTTCCTGAGCCAACAAGCGGAGTGAT |
| | TGCCCGAGCAGCAGAGATAATGGAAACATCAATACAAGCGATGAAAAGAAAAGTCAAC |
| | CTGAAAACTCAACAATCACAGCATCCAACGGATGCTTTATCAGAAGATCTGCTGAGCA |
| | TCATTGCAAACATGTCTGGATGTCTCCCTTACATGCTGCCCCCAAAATGCCCAAACAC |
| | TTGCCTGGCGAACAAATACAGGCCCATCACAGGAGCTTGCAACAACAGAGACCACCCC |
| | AGATGGGGCGCCTCCAACACGGCCCTGGCACGATGGCTCCCTCCAGTCTATGAGCACG |
| | GCTTCAGTCAGCCCCGAGGCTGGAACCCCGGCTTCTTGTACAACGGGTTCCCACTGCC |
| | CCCGGTCCGGGAGGTGACAAGACATGTCATTCAAGTTTCAAATGAGGTTGTCACAGAT |
| | GATGACCGCTATTCTGACCTCCTGATGGCATGGGGACAATACATCGACCACGACATCG |
| | CGTTCACACCACAGAGCACCAGCAAAGCTGCCTTCGGGGGAGGGGCTGACTGCCAGAT |
| | GACTTGTGAGAACCAAAACCCATGTTTTCCCATACAACTCCCGGAGGAGGCCCGGCCG |
| | GCCGCGGGCACCGCCTGTCTGCCCTTCTACCGCTCTTCGGCCGCCTGCGGCACCGGGG |
| | ACCAAGGCGCGCTCTTTGGGAACCTGTCCACGGCCAACCCGCGGCAGCAGATGAACGG |
| | GTTGACCTCGTTCCTGGACGCGTCCACCGTGTATGGCAGCTCCCCGGCCCTAGAGAGG |
| | CAGCTGCGGAACTGGACCAGTGCCGAAGGGCTGCTCCGCGTCCACGCGCGCCTCCGGG |
| | ACTCCGGCCGCGCCTACCTGCCCTTCGTGCCGCCACGCGCGCCTTCGGCCTGTGCGCC |
| | CGAGCCCGGCATCCCCGGAGAGACCCGCGGGCCCTGCTTCCTGGCCGGAGACGGCCGC |
| | GCCAGCGAGGTCCCCTCCCTGACGGCACTGCACACGCTGTGGCTGCGCGAGCACAACC |
| | GCCTGGCCGCGGCGCTCAAGGCCCTCAATGCGCACTGGAGCGCGGACGCCGTGTACCA |
| | GGAGGCGCGCAAGGTCGTGGGCGCTCTGCACCAGATCATCACCCTGAGGGATTACATC |
| | CCCAGGATCCTGGGACCCGAGGCCTTCCAGCAGTACGTGGGTCCCTATGAAGGCTATG |
| | ACTCCACCGCCAACCCCACTGTGTCCAACGTGTTCTCCACAGCCGCCTTCCGCTTCGG |
| | CCATGCCACGATCCACCCGCTGGTGAGGAGGCTGGACGCCAGCTTCCAGGAGCACCCC |
| | GACCTGCCCGGGCTGTGGCTGCACCAGGCTTTCTTCAGCCCATGGACATTACTCCGTG |
| | GAGGTTACAATGAGTGGAGGGAGTTCTGCGGCCTGCCTCGCCTGGAGACCCCCGCTGA |
| | CCTGAGCACAGCCATCGCCAGCAGGAGCGTGGCCGACAAGATCCTGGACTTGTACAAG |
| | CATCCTGACAACATCGATGTCTGGCTGGGAGGCTTAGCTGAAAACTTCCTCCCCAGGG |
| | CTCGGACAGGGCCCCTGTTTGCCTGTCTCATTGGGAAGCAGATGAAGGCTCTGCGGGA |
| | TGGTGACTGGTTTTGGTGGGAGAACAGCCACGTCTTCACGGATGCACAGAGGCGTGAG |
| | CTGGAGAAGCACTCCCTGTCTCGGGTCATCTGTGACAACACTGGCCTCACCAGGGTGC |
| | CCATGGATGCCTTCCAAGTCGGCAAATTCCCCGAAGACTTTGAGTCTTGTGACAGCAT |
| | CCCTGGCATGAACCTGGAGGCCTGGAGGGAAACCTTTCCTCAAGACGACAAGTGTGGC |
| | TTCCCAGAGAGCGTGGAGAATGGGGACTTTGTGCACTGTGAGGAGTCTGGGAGGCGCG |
| | TGCTGGTGTATTCCTGCCGGCACGGGTATGAGCTCCAAGGCCGGGAGCAGCTCACTTG |
| | CACCCAGGAAGGATGGGATTTCCAGCCTCCCCTCTGCAAAGATGTGAACGAGTGTGCA |
| | GACGGTGCCCACCCCCCCTGCCACGCCTCTGCGAGGTGCAGAAACACCAAAGGCGGCT |
| | TCCAGTGTCTCTGCGCGGACCCCTACGAGTTAGGAGACGATGGGAGAACCTGCGTAGA |
| | CTCCGGGAGGCTCCCTCGGGCGACTTGGATCTCCATGTCGCTGGCTGCTCTGCTGATC |
| | GGAGGCTTCGCAGGTCTCACCTCGACGGTGATTTGCAGGTGGACACGCACTGGCACTA |
| | AATCCACACTGCCCATCTCGGAGACAGGCGGAGGAACTCCCGAGCTGAGATGCGGAAA |
| | GCACCAGGCCGTAGGGACCTCACCGCAGCGGGCCGCAGCTCAGGACTCGGAGCAGGAG |
| | AGTGCTGGGATGGAAGGCCGGGATACTCACAGGCTGCCGAGAGCCCTCTGAGGGCAAA |
| | GTGGCAGGACACTGCAGAACAGCTTCATGTTCCCAAAATCACCGTACGACTCTTTTCC |
| | AAACACAGGCAAATCGGAAATCAGCAGGACGACTGTTTTCCCAACACGGGTAAATCTA |
| | GTACCATGTCGTAGTTACTCTCAGGCATGGATGAATAAATGTTATAGCTGC |

| | |
|---|---|
| ORF Start: ATG at 227 | ORF Stop: TGA at 2891 |

| | | |
|---|---|---|
| SEQ ID NO: 94 | 888 aa | MW at 98085.8 kD |

| | |
|---|---|
| NOV30a, | MSAVCNDLRWNIMRALAVLSVTLVMACTEAFFPFISRGKELLWGKPEESRVSSVLEES |
| CG128489- | |
| 01 Protein | KRLVDTAMYATMQRNLKKRGILSPAQLLSFSKLPEPTSGVIARAAEIMETSIQAMKRK |
| Sequence | |
| | VNLKTQQSQHPTDALSEDLLSIIANMSGCLPYMLPPKCPNTCLANKYRPITGACNNRD |
| | HPRWGASNTALARWLPPVYEDGFSQPRGWNPGFLYNGFPLPPVREVTRHVIQVSNEVV |
| | TDDDRYSDLLMAWGQYIDHDIAFTRQSTSKAAFGGGADCQMTCENQNPCFPIQLPEEA |
| | RPAAGTACLPFYRSSAACGTGDQGALFGNLSTANPRQQMNGLTSFLDASTVYGSSPAL |
| | ERQLRNWTSAEGLLRVHARLRDSGRAYLPFVPPRAPSACAPEPGIPGETRGPCFLAGD |
| | GRASEVPSLTALHTLWLREHNRLAAALKALNAHWSADAVYQEARKVVGALHQIITLRD |
| | YIPRILGPEAFQQYVGPYEGYDSTANPTVSNVFSTAAFRFGHATIHPLVRRLDASFQE |
| | HPDLRGLWLHQAFFSPWTLLRGGYNEWREFCGLPRLETPADLSTAIASRSVADKILDL |
| | YKHPDNIDVWLGGLAENFLPRARTGPLFACLIGKQMKALRDGDWFWWENSHVFTDAQR |
| | RELEKHSLSRVICDNTGLTRVPMDAFQVGKFPEDFESCDSIPGMNLEAWRETFRQDDK |
| | CGFPESVENGDFVHCEESGRRVLVYSCRHGYELQGREQLTCTQEGWDFQPPLCKDVNE |
| | CADGAHPPCHASARCRNTKGGFQCLCADPYELGDDGRTCVDSGRLPRATWISMSLAAL |
| | LIGGFAGLTSTVICRWTRTGTKSTLPISETGGGTPELRCGKHQAVGTSPQRAAAQDSE |
| | QESAGMEGRDTHRLPRAL |

[0478] Further analysis of the NOV30a protein yielded the following properties shown in Table 30B.

TABLE 30B
Protein Sequence Properties NOV30a

| | |
|---|---|
| PSort | 0.4600 probability located in plasma membrane: 0.1676 |
| analysis: | probability located in microbody (peroxisome); 0.1000 |
| | probability located in endoplasmic reticulum (membrane); |
| | 0.1000 probability located in endoplasmic reticulum (lumen) |
| SignalP | Cleavage site between residues 31 and 32 |
| analysis: | |

[0479] A search of the NOV30a protein against the Geneseq database, a proprietary database that contains sequences published in patents and patent publication, yielded several homologous proteins shown in Table 30C.

TABLE 30C
Geneseq Results for NOV30a

| | | NOV30a | | |
|---|---|---|---|---|
| | Protein/Organism/ | Residues/ | Identities/ | |
| Geneseq | Length [Patent #, | Match | Similarities for | Expect |
| Identifier | Date] | Residues | the Matched Region | Value |
| AAR75689 | Human thryoid peroxidase-Homo | 13 . . . 888 | 873/933 (93%) | 0.0 |
| | sapiens, 933 aa. [EP655502-A, | 1 . . . 933 | 875/933 (93%) | |
| | 31 May 1995] | | | |
| AAW48781 | Thyroid peroxidase-Homo sapiens, | 13 . . . 888 | 872/933 (93%) | 0.0 |
| | 948 aa. [WO9820354-A2, | 16 . . . 948 | 876/933 (93%) | |
| | 14 May 1998] | | | |
| AAW48782 | Thyroid peroxidase deletion mutant- | 13 . . . 802 | 771/847 (91%) | 0.0 |
| | Homo sapiens, 852 aa. [WO9820354- | 16 . . . 851 | 776/847 (91%) | |
| | A2, 14 MAY 1998] | | | |
| AAW48791 | Thyroid peroxidase deletion mutant 10- | 13 . . . 741 | 704/786 (89%) | 0.0 |
| | Homo sapiens, 881 aa. | 16 . . . 790 | 708/786 (89%) | |
| | [WO9820354-A2, 14 May 1998] | | | |
| AAW48790 | Thyroid peroxidase deletion mutant 9- | 13 . . . 570 | 556/615 (90%) | 0.0 |
| | Homo sapiens, 740 aa. | 16 . . . 630 | 558/615 (90%) | |
| | [WO9820354-A2, 14 May 1998] | | | |

[0480] In a BLAST search of public sequence databases, the NOV30a protein was found to have homology to the proteins shown in the BLASTP data in Table 30D.

TABLE 30D
Public BLASTP Results for NOV30a

| | | NOV30a | | |
|---|---|---|---|---|
| Protein | | Residues/ | Identities/ | |
| Accession | | Match | Similarities for | Expect |
| Number | Protein/Organism/Length | Residues | the Matched Portion | Value |
| P07202 | Thyroid peroxidase precursor (EC | 13 . . . 888 | 874/933 (93%) | 0.0 |
| | 1.11.1.8) (TPO)-Homo sapiens | 1 . . . 933 | 876/933 (93%) | |
| | (Human), 933 aa. | | | |
| OPHUIT | iodide peroxidase (EC 1.11.1.8) | 13 . . . 888 | 872/933 (93%) | 0.0 |
| | precursor, thyroid-human, 933 aa. | 1 . . . 933 | 874/933 (93%) | |
| AAA61217 | Thyroid peroxidase-Homo sapiens | 13 . . . 888 | 868/933 (93%) | 0.0 |
| | (Human), 933 aa. | 1 . . . 933 | 871/933 (93%) | |
| P14650 | Thyroid peroxidase precursor (EC | 13 . . . 874 | 633/919 (68%) | 0.0 |
| | 1.11.1.8) (TPO)-Rattus norvegicus | 1 . . . 905 | 718/919 (77%) | |
| | (Rat), 914 aa. | | | |
| P09933 | Thyroid peroxidase precursor (EC | 13 . . . 876 | 620/926 (66%) | 0.0 |
| | 1.11.1.8) (TPO)-Sus scrofa (Pig), | 1 . . . 924 | 703/926 (74%) | |
| | 926 aa. | | | |

[0481] PFam analysis predicts that the NOV30a protein contains the domains shown in the Table 30E.

TABLE 30E
Domain Analysis of NOV30a

| | | Identities/ | |
|---|---|---|---|
| Pfam | NOV30a | Similarities for | Expect |
| Domain | Match Region | the Matched Region | Value |
| An_peroxidase | 162 . . . 658 | 208/622 (33%) | 1.5e−122 |
| | | 374/622 (60%) | |
| Sushi | 697 . . . 749 | 18/63 (29%) | 2.5e−06 |
| | | 38/63 (60%) | |
| EGF | 755 . . . 793 | 15/47 (32%) | 1.2e−08 |
| | | 33/47 (70%) | |

### Example 31

[0482] The NOV31 clone was analyzed, and the nucleotide and encoded polypeptide sequences are shown in Table 31A.

TABLE 31A

NOV31 Sequence Analysis

| | |
|---|---|
| | SEQ ID NO: 95 2921 bp |
| NOV31a. | GGGCTCCGGAGGCCATGCCGGCGTTGGCGCGCGACGGCGGCCAGCTGCCGCTGCTCGT |
| CG128825-01 | |
| DNA | TGTTTTTTCTGCCATGATATTTGGGACTATTACAAATCAAGATCTGCCTGTGATCAAG |
| Sequence | |
| | TGTGTTTTAATCAATCATAAGAACAATGATTCATCAGTGGGGAAGTCATCATCATATC |
| | CCATGGTATCAGAATCCCCGGAAGACCTCGGGTGTGCGTTGAGACCCCAGAGCTCAGG |
| | GACAGTGTACGAAGCTGCCGCTGTGGAAGTGGATGTATCTGCTTCCATCACACTGCAA |
| | GTGCTGGTCGATGCCCCAGGGAAACATTTCCTGTCTCTGGGTCTTTAAGCACAGCTCCC |
| | TGAATTGCCAGCCACATTTTGATTTACAAAACAGAGGAGTTGTTTCCATGGTCATTTT |
| | GAAAATGACAGAACCCAAAGCTGGAGAATACCTACTTTTTATTCAGAGTGAAGCTACC |
| | AATTACACAATATTGTTTACAGTGAGTATAAGAAATACCCTGCTTTACACATTAAGAA |
| | GACCTTACTTTAGAAAAATGGAAAACCAGGACGCCCTGGTCTGCATATCTGAGAGCGT |
| | TCCAGAGCCGATCGTGGAATGGGTGCTTTGCGAATTCACAAGGGGGAGCTGTAAAGAA |
| | GAAAGTCCAGCTGTTGTTAAAAAGGAGGAAAAAGTGCTTCATGAATTATTTGGGATGG |
| | ACATAAGGTGCTGTGCCAGAATGAACTGGGCAAGGGAATGCACCAGGCTGTTCACAAT |
| | AGATCTAATCAACTCCTCAGACCACATTGCCACCAATTATTTCTTTAAAGTAGGGGAA |
| | CCCTTATGGATAAGGTGCAAAGCTGTTCATGTGCAACCATGATTCGGGCTCACCTGGG |
| | AAATTAGAACAAAAGCACTCGAGGAGGGCAACTACTTTGAGATGAGTACCTATTCAAC |
| | AACAGAACTATGATACGGATTCTGTTTGCTTTTGTATCATCAGTGGCAAGAAAACGAC |
| | ACCGGATACTACACTTGTTCCTCTTCAAAGCATCCCAGTCAATCAGCTTTGGTTACCA |
| | TCGTAGAAAAGGGATTTATAAATGCTACCAATTCAAGTGAAGATTATGAAATTGACCA |
| | ATATGAAGAGTTTTGTTTTTCTGTCAGGTTTAAAAGCCTACCCACAATCAGATGTACG |
| | TGGACCTTCTCTCGAAAATCATTTCCTTGTGAGCAAAAGGGTCTTGATAACGGATACA |
| | GCATATCCAAGTTTTGCAATCATAAGCACCAGCCAGGAGAATATATATTCCATGCAGA |
| | AAATGATGATGCCCAATTTACCAAAATGTTCACGCTGAATATAAGAAGGAAACCTCAA |
| | GTGCTCGCAGAAGCATCGGCAAGTCAGGCGTCCTGTTTCTCGGATGGATACCCATTAC |
| | CATCTTGGACCTGGAAGAAGTGTTCAGACAAGTCTCCCAACTGCACAGAAGAGATCAC |
| | AGAAGGAGTCTGGAATAGAAAGGCTAACAGAAAAGTGTTTGGACAGTGGGTGTCGAGC |
| | AGTACTCTAAACATGAGTGAAGCCATAAAAGGGTTCCTGGTCAAGTGCTGTGCATACA |
| | ATTCCCTTGGCACATCTTGTGAGACGATCCTTTTAAACTCTCCAGGCCCCTTCCCTTT |
| | CATCCAAGACAACATCTCATTCTATGCAACAATTGGTGTTTGTCTCCTCTTCATTGTC |
| | GTTTTAACCCTGCTAATTTGTCACAAGTACAAAAAGCAATTTAGGTATGAAAGCCAGC |
| | TACAGATGGTACAGGTGACCGGCTCCTCAGATAATGAGTACTTCTACGTTGATTTCAG |
| | AGAATATGAATATGATCTCAAATGGGAGTTTCCAAGAGAAAATTTAGAGTTTGGGAAG |
| | GTACTAGGATCAGGTGCTTTTGGAAAAGTGATGAACGCAACAGCTTATGGAATTAGCA |
| | AAACAGGAGTCTCAATCCAGGTTGCCGTCAAAATGCTGAAAGAAAAAGCAGACAGCTC |
| | TGAAAGAGAGGCACTCATGTCAGAACTCAAGGTGATGACCCAGCTGGGAAGCCACGAG |
| | AATATTGTGAACCTGCTGGGCGCGTGCACACTGTCAGGACCAATTTACTTGATTTTTG |
| | AATACTGTTGCTATGGTGATCTTCTCAACTATCTAAGAAGTAAAAGAGAAAAATTTCA |
| | CAGGACTTGAACAGAGATTTTCAAGGAACACAATTTCAGTTTTTACCCCACTTTCCAA |
| | TCACATCCAAATTCCAGCATGCCTGGTTCAAGAGAAGTTCAGATACACCCGGACTCGG |
| | ATCAAATCTCAGGGCTTCATGGGAATTCATTTCACTCTGAAGATGAAATTGAATATGA |
| | AAACCAAAAAAGGCTGGAAGAAGAGGAGGACTTGAATGTGCTTACATTTGAAGATCTT |
| | CTTTGCTTTGCATATCAAGTTGCCAAAGGAATGGAATTTCTGGAATTTAAGTCGGCCC |
| | GTCTGCCTGTAAAATGGATGGCCCCCGAAAGCCTGTTTGAAGGCATCTACACCATTAA |
| | GAGTGATGTCTGGTCATATGGAATATTACTGTGGGAAATCTTCTCACTTGGTGTGAAT |
| | CCTTACCCTGGCATTCCGGTTGATGCTAACTTCTACAAACTGATTCAAAATGGATTTA |
| | AAATGGATCAGCCATTTTATGCTACAGAAGAAATATACATTATAATGCAATCCTGCTG |
| | GGCTTTTGACTCAAGGAAACGGCCATCCTTCCCTAATTTGACTTCGTTTTTAGGATGT |
| | CAGCTGGCAGATGCAGAAGAAGCGATGTATCAGAATGTGGATGGCCGTGTTTCGGAAT |
| | GTCCTCACACCTACCAAAACAGGCGACCTTTCAGCAGAGAGATGGATTTGGGGCTACT |
| | CTCTCCGCAGGCTCAGGTCGAAGATTCGTAGAGGAACAATTTAGTTTTAAGGACTTCA |
| | TCCCTCCACCTATCCCTAACA |
| | ORF Start: ATG at 15 ORF Stop: TAG at 2871 |
| | SEQ ID NO: 96 952 aa MW at 108375.0kD |
| NOV31a. | MPALARDGGQLRLLVVFSANTFGTTTNQDLPVIKCVLINHKNNDSSVGKSSSYPMVSE |
| CG128825-01 | |
| Protein | SPEDLGCALRPQSSGTVYEAAAVEVDVSASITLQVLVDAPGNISCLWVPKHSSLNCQP |
| Sequence | |
| | HFDLQNRGVVSMVILKMTETQAGEYLLFIQSEATNYTILFTVSIRNTLLYTLRRPYFR |
| | KMENQDALVCISESVPEPIVEWVLCDSQGFSCKEESPAVVKKEEKVLHELFGMDIRCC |
| | ARNELGRECTRLFTIDLNQTRQTTLRQLFLKVGEPLWIRCKAVHVNHGFGLTWELENK |
| | ALEEGNYFEMSTYSTNRTMIRILFAFVSSVARNDTGYYTCSSSKHPSQSALVTIVEKG |
| | FINATNSSEDYETDQYEEFCFSVRFKAYPQIRCTWTFSRKSPPCEQKGLDNGYSISKF |
| | CNHKHQPGEYIFHAENDDAQFTKMFTLNIRRKPQVLAEASASQASCFSDGYPLPSWTW |
| | KKCSDKSPNCTEEITEGVWNRKANRKVFGQWVSSSTLHMSEAIKGFLVKCCAYNSLGT |
| | SCETILLNSPGPFPFIQDNISFYATIGVCLLFIVVLTLLICHKYKKQFRYESQLQMVQ |
| | VTGSSDNEYFYVDFREYEYDLKWEFPRENLEFGKVLGSGAPGKVMNATAYGISKTGVS |
| | IQVAVKMLKEKADSSEREALMSELKVMTQLGSHENIVNLLGACTLSGPIYLTPEYCCY |
| | GDLLNYLRSKREKFHRTWTEIFKEHNFSFYRTFQSHPNSSMPGSREVQTHPDSDQISG |
| | LHGNSFHSEDEIEYENQKRLEEEEDLNVLTFEDLLCFAYQVAKGMEFLEFKSARLPVK |
| | WMAPESLFEGIYTIKSDVWSYGILLWEIFSLGVNPYPGIPVDANFYKLIQNGFKMDQP |
| | FYATEETYIIMQSCWAFDSRKRPSFPNLTSFLGCQLADAEEAMYQNVDGRVSECPHTY |
| | QNRRPFSREMDLGLLSPQAQVEDS |
| | SEQ ID NO: 97 3270 bp |
| NOV31b, | ATGCCGGCGTTGGCGCGCGACGGCGGCCAGCTGCCGCTGCTCGTTGTTTTTTCTGCAA |
| CG128825-02 | |
| DNA | TGATATTTGGGACTATTACAAATCAGATCTGCCTGTGATCAAAGTGTGTTTTAATCAA |
| Sequence | |
| | TCATAAGAACAATGATTCATCAGTGGGGAAGTCATCATCATATCCCATGGTATCAGAA |
| | TCCCCGGAAGACCTCGGGTGTGCGTTGAGACCCCAGAGCTCAGGGACAGTGTACGAAC |
| | GTGCCGCTGTGGAAGTGGATGTATCTGCTTCCATCACACTGCAAGTGCTGGTCGATGC |
| | CCCAGGGAACATTTCCTGTCTCTGGGTCTTTAAGCACAGCTCCCTGAATTGCCAGCCA |
| | CATTTTGATTTACAAAACAGAAGGAGTTGTTTCCATGGTCATTTTGGAATGACAGAAA |
| | CCCAAGCTGGAGAATACCTACTTTTTATTCAGAGTGAAGCTACCAATTACACAATATT |
| | GTTTACAGTGAAGTATAAGAATACCCTGCTTTACACATTAAGAAGACCTTACTTTAGA |
| | AAAATGGAAAACCAGGACGCCCTGGTCTGCATATCTGAGAGCGTTCCAGAGCCGATCG |
| | TGGAATGGGTGCTTTGCGATTCACAGGGGGAAAGCTGTAAAGAAGAAAGTCCAGCTCT |
| | TGTTAAAAAGGAGGAAAAGTGCTTCATGAATTATTTGGGATGGACATAAGGTGCTGT |
| | GCCAGAATGAACTGGGCAGGGAATGCACCAGGCTGTTCACAATAGATCTAAATCAAA |
| | CTCCTCAGACCACATTGCCACAATTATTTCTTAAGTAGGGGAACCCTTATGGATAAG |
| | GTGCAAAGCTGTTCATGTGAACCATGGATTCGGGCTCACCTGGGAATTAGAAAACAA |
| | GCACTCGAGGAGGGCAACTACTTTGAGATGAGTACCTATTCAACAACAGAACTATGA |
| | TACGGATTCTGTTTGCTTTTGTATCATCAGTGGCAAGAACGACACCGGATACTACAC |
| | TTGTTCCTCTTCAAGCATCCCAGTCAATCAGCTTTGGTTACCATCGTAGAAAAGGGA |
| | TTTATAATGCTACCAATTCAAGTGAAGATTATGAAATTGACCAATATGAAGAGTTTT |
| | GTTTTTCTGTCAGGTTTAAAGCCTACCCACAATCAGATGTACGTGGACCTTCTCTCG |
| | AAAATCATTTCCTTGTGAGCAAAGGGTCTTGATAACGGATACAGCATATCCAAGTTT |
| | TGCAATCATAAGCACCAGCCAGGAGAATATATATTCCATGCAGAAATGATGATGCCC |
| | AATTTACCAAAATGTTCACGCTGATATAAGAAGGAAACCTCAAGTGCTCGCAGAAGC |
| | ATCGGCAAGTCAGGCGTCCTGTTTCTCGGATGGATACCCATTACCATCTTGGACCTGG |
| | AAGAAGTGTTCAGACAAGTCTCCCAACTGCACAGAAGAGATCACAGAAGGAGTCTGGA |
| | ATAGAAAGGCTAACAGAAAAGTGTTTGGACAGTGGGTGTCGAGCAGTACTCTAAACAT |
| | GAGTGAAGCCATAAAAGGGTTCCTGGTCAAGTGCTGTGCATACAATTCCCTTGGCACA |
| | TCTTGTGAGACGATCCTTTTAACTCTCCAGGCCCCTTCCCTTTCATCCAAAGACAACA |
| | TCTCATTCTATGCAACAATTGGTGTTTGTCTCCTCTTCATTGTCGTTTTAACCCTGCT |
| | AATTTGTCACAAGTACAAAAAGCAATTTAGGTATGAAGCCAAGCTACAGATGGTACAG |
| | GTGACCGGCTCCTCAGATAATGAGTACTTCTACGTTGATTTCAGAGAATATGAATATG |
| | ATCTCAAATGGGAGTTTCCAAGAGAAAATTTAGAGTTTGGGAAGGTACTAGGATCAGG |
| | TGCTTTTGGAAAGTGATGAACGCAACAGCTTATGGAAATTAGCAAAACAGGAGTCTCA |
| | ATCCAGGTTGCCGTCAAAATGCTGAAAGAAAAGCAGACAGCCTCTGAAAGAGAGGCAC |
| | TCATGTCAGAACTCAAGATGATGACCCAGCTGGGAAGCCACGAGAATATTGTGAACCT |
| | GCTGGGGGCGTGCACACTGTCAGGACCAATTTACTTGATTTTTGAATACTGTTGCTAT |
| | GGTGATCTTCTCAACTATCTAAGAAGTAAAAGAGAAAAATTTCACAGGACTTGGACAG |
| | AGATTTTCAAGGAACACAATTTCAGTTTTTACCCCACTTTCCAATCACATCCAAATTC |
| | CAGCATGCCTGGTTCAAGAGAAGTTCAGATACACCCGGACTCGGATCAAATCTCAGGG |
| | CTTCATGGGAATTCATTTCACTCTGAAGATGAAATTGAATATGAAAACCAAAAAAGGC |
| | TGGAAGAAGAGGAGGACTTGAATGTGCTTACATTTGAAGATCTTCTTTGCTTTGCATA |
| | TCAAGTTGCCAAAGGAATGGAATTTCTGGAATTTAAGTCGTGTGTTCACAGAGACCTG |
| | GCCGCCAGGAACGTGCTTGTCACCCACGGGAAAGTGGTGAAGATATGTGACTTTGGAT |
| | TGGCTCGAGATATCATGAGTGATTCCAACTATGTTGTCAGGGGCAATGCCCGTCTGCC |
| | TGTAAAATGGATGGCCCCCGAAAGCCTGTTTGAAGGCATCTACACCATTAAGAGTGAT |
| | GTCTGGTCATATGGAATATTACTGTGGGAAATCTTCTCACTTGGTGTGAATCCTTACC |
| | CTGGCATTCCGGTTGATGCTAACTTCTACAAACTGATTCAAAATGGATTTAAAATGGA |
| | TCAGCCATTTTATGCTACAGAGAAATATACATTATAAATGCAATCCTGCTGGGCTTTT |
| | GACTCAAGGAAACGGCCATCCTTCCCTAATTTGACTTCGTTTTTAGGATGTCAGCTGG |
| | CAGATGCAGAAGAAGCGAAACTGTGGAAAATCCCTGAGACAATGAAAGCAGTTAAAAT |
| | TGCACCGCAGAGGGAAAACCCACCACAGAGGATGCCTGGGAAAAACAAGGACAAGGGT |
| | AACACAAAGGCAGCAAGAAGTCCTGGGACACTGCAGAAGTTCTGAAGCAGGAGCAGCC |
| | ACATGGTGAAATCAACATAAGATTAAATATGTATCAGAATGTGGATGGCCGTGTTTCG |
| | GAATGTCCTCACACCTACCAAAACAGGCGACCTTTCAGCAGAGAGATGGATTTGGGGC |
| | TACTCTCTCCGCAGGCTCAGGTCGAAGATTCGTAGAGGAACAATTTAGTTTTAAGGAC |
| | TTCATCCCTCCACCTATCCCTAACAGGCTGTAGATTACCAAAACAAGATTAATTTCAT |
| | CACTAAAAGAAAATCTATTATC |
| | ORF Start: ATG at 1 ORF Stop: TGA at 3001 |
| | SEQ ID NO: 98 1000 aa MW at 113678.6kD |
| NOV31b, | MPALARDGGQLPLLVVFSAMIFGTTTNQDLPVIKCVLINHKNNDSSVGKSSSYPMVSE |
| CG128825-02 | |
| Protein | SPEDLGCALRPQSSGTVYERAAVEVDVSASITLQVLVDAPGNISCLWVFKHSSLNCQP |
| Sequence | |
| | HFDLQNRGVVSMVILKMTETQAGEYLLFTQSEATNYTTLFTVSIRNTLLYTLRRRYFR |
| | KMENQDALVCISESVPEPIVEWVLCDSQGESCKEESPAVVKKEEKVLHELFGMDIRCC |
| | ARNELGRECTRLFTIDLNQTPQTTLPQLFLKVGEPLWIRCKAVHVNHGFGLTWELENK |
| | ALEEGNYFEMSTYSTNRTMIRTLFAFVSSVARNDTGYYTCSSSKHPSQSALVTIVEKG |
| | FINATNSSEDYEIDQYEEFCFSVRFKAYPQIRCTWTFSRKSFPCEQKGLDNGYSISKE |
| | CNHKHQPGEYTFHAENDDAQFTKMFTLNIRRKPQVLAEASASQASCPSDGYPLPSWTW |
| | KKCSDKSPNCTEEITEGVWNRKANRKVFGQWVSSSTLNMSEATKGFLVKCCAYNSLGT |
| | SCETILLNSPGPFPFIQDNISFYATIGVCLLFIVVLTLLICHKYKKQFRYESQLQMVQ |
| | VTGSSDNEYPYVDFREYEYDLKWEFPRENLEFGKVLGSGAFGKVMNATAYGISKTGVS |
| | IQVAVKMLKEKADSSEREALMSELKMMTQLGSHENIVNLLGACTLSGPIYLIFEYCCY |
| | GDLLNYLRSKREKFHRTWTEIFKEHNFSFYPTFQSHPNSSMRGSREVQTHPDSDQISG |
| | LHGNSFHSEDEIEYENQKRLEEEEDLNVLTFEDLLCFAYQVAKGMEFLEFKSCVHRDL |
| | AARNVLVTHGKVVKICDFGLARDIMSDSNYVVRGNARLPVKWMAPESLFEGIYTIKSD |
| | VWSYGILLWEIFSLGVNPYPGIRVDANFYKLIQNGFKMDQRFYATEEIYIIMQSCWAF |
| | DSRKRRSFPNLTSFLGCQLADAEEAKLWKIPETMKAVKIAPQRENPPQRMPGKNKDKG |
| | NTKAARSPGTLQKF |

[0483] Sequence comprising of the above protein sequences yields the following sequences relationships shown in Table 31B.

TABLE 31B
Comparison of NOV31a against NOV31b

| | | Identities/ |
|---|---|---|
| Protein | NOV31a Residues/ | Similarities for |
| Sequence | Match Residues | the Matched Region |
| NOV31b | 1 . . . 912 | 910/953 (95%) |
| | 1 . . . 953 | 911/953 (95%) |

[0484] Further analysis of the NOV31a protein yielded the following properties shown in Table 31C.

TABLE 31C
Protein Sequence Properties NOV31a

| | |
|---|---|
| PSort | 0.4600 probability located in plasma membrane; 0.1662 |
| analysis: | probability located in microbody (peroxisome); 0.1000 |
| | probability located in endoplasmic reticulum (membrane); |
| | 0.1000 probability located in endoplasmic reticulum (lumen) |
| SignalP | Cleavage site between residues 28 and 29 |
| analysis: | |

[0485] A search of the NOV31a protein against the Geneseq database, a proprietary database that contains sequences published in patents and patent publication, yielded several homologous proteins shown in Table 31D.

TABLE 31D
Geneseq Results for NOV31a

| | | NOV31a | | |
|---|---|---|---|---|
| | Protein/Organism/ | Residues/ | Identities/ | |
| Geneseq | Length [Patent #, | Match | Similarities for | Expect |
| Identifier | Date] | Residues | the Matched Region | Value |
| AAR75961 | Human STK-1-Homo sapiens, 993 | 1 . . . 952 | 947/993 (95%) | 0.0 |
| | aa. [WO9519175-A, 20 Jul. 1995] | 1 . . . 993 | 949/993 (95%) | |
| AAY08617 | Human flk-2 protein-Homo sapiens, | 1 . . . 952 | 946/993 (95%) | 0.0 |
| | 993 aa. [U.S. Pat. No. 5912133-A, | 1 . . . 993 | 948/993 (95%) | |
| | 15 Jun. 1999] | | | |
| AAW19873 | Human flk-2 receptor-Homo | 1 . . . 952 | 946/993 (95%) | 0.0 |
| | sapiens, 993 aa. [U.S. Pat. No. 5621090-A, | 1 . . . 993 | 948/993 (95%) | |
| | 15 Apr. 1997] | | | |
| AAR97419 | Murine foetal liver kinase 2-Mus | 1 . . . 952 | 946/993 (95%) | 0.0 |
| | musculus, 993 aa. [U.S. Pat. No. 5548065-A, | 1 . . . 993 | 948/993 (95%) | |
| | 20 Aug. 1996] | | | |
| AAR67536 | Human flk-2-Homo sapiens, 993 aa | 1 . . . 952 | 946/993 (95%) | 0.0 |
| | [U.S. Pat. No. 5367057-A, 22 Nov. 1994] | 1 . . . 993 | 948/993 (95%) | |

[0486] In a BLAST search of public sequence databases, the NOV31a protein was found to have homology to the proteins shown in the BLASTP data in Table 31E.

TABLE 31E
Public BLASTP Results for NOV31a

| | | NOV31a | | |
|---|---|---|---|---|
| Protein | | Residues/ | Identities/ | |
| Accession | | Match | Similarities for | Expect |
| Number | Protein/Organism/Length | Residues | the Matched Portion | Value |
| P36888 | FL cytokine receptor precursor (EC | 1 . . . 952 | 946/993 (95%) | 0.0 |
| | 2.7.1.112) (Tyrosine-protein kinase | 1 . . . 993 | 948/993 (95%) | |
| | receptor FLT3) (Stem cell tyrosine kinase | | | |
| | 1) (STK-1) (CD135 antigen)-Homo | | | |
| | sapiens (Human), 993 aa. | | | |
| A36873 | protein-tyrosine kinase (EC 2.7.1.112) | 1 . . . 952 | 946/994 (95%) | 0.0 |
| | STK-1 precursor-human, 993 aa. | 1 . . . 993 | 948/994 (95%) | |
| S18827 | Flt3 protein-mouse, 1000 aa. | 1 . . . 950 | 812/994 (81%) | 0.0 |
| | | 1 . . . 994 | 867/994 (86%) | |
| Q00342 | FL cytokine receptor precursor (EC | 1 . . . 912 | 788/956 (82%) | 0.0 |
| | 2.7.1.112) (Tyrosine-protein kinase | 1 . . . 956 | 841/956 (87%) | |
| | receptor flk-2) (Fetal liver kinase 2) | | | |
| | musculus (Mouse), 992 aa. | | | |
| O97745 | Mast/stem cell growth factor receptor-Sus | 47 . . . 917 | 282/911 (30%) | e−103 |
| | scrofa (Pig), 923 aa (fragment). | 20 . . . 894 | 437/911 (47%) | |

[0487] PFam analysis predicts that the NOV31a protein contains the domains shown in the Table 31F.

TABLE 31F
Domain Analysis of NOV31a

| | | Identities/ | |
|---|---|---|---|
| Pfam | NOV31a | Similarities for | Expect |
| Domain | Match Region | the Matched Region | Value |
| Ig | 265 . . . 332 | 14/70 (20%) | 2.1e−06 |
| | | 45/70 (64%) | |
| Pkinase | 610 . . . 710 | 35/102 (34%) | 2.7e−24 |
| | | 84/102 (82%) | |
| Pkinase | 782 . . . 803 | 6/22 (27%) | 0.98 |
| | | 22/22 (100%) | |
| Pkinase | 810 . . . 898 | 26/124 (21%) | 4.2e−18 |
| | | 66/124 (53%) | |

### Example 32

[0488] The NOV32 clone was analyzed and the nucleotide and encoded poly,peptide sequences are shown in Table 32A.

TABLE 32A
NOV32 Sequence Analysis+HZ,1/46

| | |
|---|---|
| | SEQ ID NO 99 5347 bp |
| NOV32a. | AAATCGAAGCAAACATGTCTGGAGAAGTGCGTTTGAGGCAGTTGGAGCAGTTTATTTT |
| CG128891-01 | |
| DNA | GGACGGGCCCGCTCAGACCAATGGGCAGTGCTTCAGTGTGGAGACATTACTGGATATA |
| Sequence | |
| | CTCATCTGCCTTTATGATGAATGCAATAATTCTCCATTGAGAAGAGAGAAGAACATTC |
| | TCGAATACCTAGAATGGGGTGCTAAACCATTTACTTCTAAAGTGAAACAAATGCGATT |
| | ACATAGAGAAGACTTTGAAATATTAAAGGTGATTGGTCGAGGAGCTTTTGGGGAGGTT |
| | GCTGTAGTAAAACTAAAAAATGCAGATAAAGTGTTTGCCATGAAAATATTGAATAAAT |
| | GGGAAATGCTGAAAAGAGCTGAGACAGCATGTTTTCGTGAAGAAAGGGATGTATTAGT |
| | GAATGGAGACAATAAATGGATTACAACCTTGCACTATGCTTTCCAGGATGACAATAAC |
| | TTATACCTGGTTATGGATTATTATGTTGGTGGGGATTTGCTTACTCTACTCAGCAAAT |
| | TTGAAGATAGATTGCCTGAAGATATGGCTAGATTTTACTTGGCTGAGATGGTGATAGC |
| | AATTGACTCAGTTCATCAGCTACATTATGTACACAGAGACATTAAACCTGACAATATA |
| | CTGATGGATATGAATGGACATATTCGGTTAGCAGATTTTGGTTCTTGTCTGAAGCTGA |
| | TGGAAGATGGAACGGTTCAGTCCTCAGTGGCTGTAGGAACTCCAGATTATATCTCTCC |
| | TGGTCTTTGGGGGTCTGTATGTATGAAATGCTTTACGGAGAAACACCATTTTATGCAG |
| | AATCGCTGGTGGAGACATACGGAAAAATCATGAACCACAAAGAGAGGTTTCAGTTTCC |
| | AGCCCAAGTGACTGATGTGTCTGAAAATGCTAAGGATCTTATTCGAAGGCTCATTTGT |
| | AGCAGAGAACATCGACTTGGTCAAATGGAATAGAAGACTTTAAGAAACACCCATTTT |
| | TCAGTGGAATTGATTGGGATAATATTCGGAACTGTGAAGCACCTTATATTCCAGAAGT |
| | TAGTAGCCCAACAGATACATCGAATTTTGATGTAGATGATGATTGTTTAAAAAATTCT |
| | GAAACGATGCCCCCACCAACACATACTGCATTTTCTGGCCACCATCTGCCATTTGTTG |
| | GTTTTACATATACTAGTAGCTGTGTACTTTCTGATCGGAGCTGTTTAAGAGTTACGGC |
| | TGGTCCCACCTCACTGGATCTTGATGTTAATGTTCAGAGGACTCTAGACAACAACTTA |
| | GCAACTGAAGCTTATGAAAGAAGAATTAAGCGCCTTGAGCAAGAAAAACTTGAACTCA |
| | GTAGAAAACTTCAAGAGTCAACACAGACTGTCCAAGCTCTGCAGTATTCAACTGTTGA |
| | TGGTCCACTAACAGCAAGCAAAGATTTAGAAATAAAACTTAAAAGAAGAAAAATTGAA |
| | AAACTAAGAAAACAAGTAACAGAATCAAGTCATTTGGAACAGCAACTTGAAGAAGCTA |
| | ATGCTGTGAGGCAAGAACTAGATGATGCTTTTAGACAAATCAAGGCTTATGAAAAACA |
| | AATCAAAACGTTACAACAAGAAAGAGAAGATCTAAATAAGGAACTAGTCCAGGCTAGT |
| | GAGCGATTAAAAAACCAATCCAAAGAGCTGAAAGACGCACACTGTCAGAGGAAACTGG |
| | CCATGCAGGAATTCATGGAGATCAATGAGCGGCTAACAGAATTGCACACCCAAAAACA |
| | GAAACTTGCTCGCCATGTCCGAGATAAGGAAGAAGAGGTGGACCTGGTGATGCAAAAA |
| | GTTGAAAGCTTAAGGCAAGAACTGCGCAGAACAGAAAGAGCCAAAAAAGAGCTGGAAG |
| | TTCATACAGAAGCTCTAGCTGCTGAAGCATCTAAGACAGGAAAGCTACGTGACAAGAG |
| | TGAGCACTAATTCTAAGCAACTGGAAAATGAATTGGAGGGACTGAAAAAGCACAAATT |
| | AGTTACTCACCAGGAGTATGCAGCATAGAACATCAGCAAAGAGATAACCAAACTAAGA |
| | CTGATTTGGAAAAGAAAAGTATCTTTTATGAAGAAGAATTATCTAAAAGAGAAGGAAT |
| | ACATGCAAATGAAAATAAAAAATCTTAAGAAGAACTGCATGATTCAGAAGGTCAGCAA |
| | CTTGCTCTCAACAAAGAAATTATGATTTTAAAAGACAAATTGGAAAAAACCAGAAGAG |
| | AAAGTCAAAGTGAAAGGGAGGAATTTGAAAGTGAGTTCAAACAACAATATGAACGAGA |
| | AAAAGTGTTGTTAACTGAAGAAAATAAAAAGCTGACGAGTGAACTTGATAAGCTTACT |
| | ACTTTGTATGAGAACTTAAGTATACACAACCAGCAGTTAGAAGAAGAGGTTAAAGATC |
| | TAGCAGACAAGAAGAATCAGTTGCACATTGGGAAGCCCAAATCACAGAAATAAATTCA |
| | GTGGGTCAGCGATGAAAAGGATGCACGATGGTATCTTCAGGCCTTAGCTTCTAAAATG |
| | ACTGAAGAATTGGAGGCATTAAGAAATTCCAGCTTGGGTACACGAGCAACAGTAAGCT |
| | TCTATGATATGCCCTGGAAAATGCGTCGTTTTGCGAAACTGGATATGTCAGCTAGACT |
| | GGAGTTGCAGTCGGCTCTGGATGCAGAATAAAAGAGCCAAACAGGCCATCCAAGAGAG |
| | TTGAATAAAGTTAAAGCATCTAATATCATAACAGAAAAACTAAAAGATTCAGAGAAGA |
| | AGAACTTGGAACTACTCTCAGAAATCGAACAGCTGATAAAGGACACTGAAGAGCTTAG |
| | ATCTGAAAAGGGTATGGAGCACCAAGACTCACAGCATTCTTTCTTGGCATTTTTGAAT |
| | ACGCCTACCGATGCTCTGGATCAATTTGAATCTCCATCCTGTACTCCAGCTAGCAAAG |
| | GCAGACGTGTAAGAGACTCCACTCCACTTTCAGTTCACACACCAACCTTAAGGAAAAA |
| | AGGATGTCCTGGTTCAACTGGCTTTCCACCTAAGCGCAAGACTCACCAGTTTTTTGTA |
| | AAATCTTTTACTACTCCTACCAAGTGTCATCAGTGTACCTCCTTGATGGTGGGTTTAA |
| | TAAGACAAGGGCTGTTCATGTGAAGTGTGTGGATTCTCATGCCATATAACTTGTGTAA |
| | CAAAGCTCCAACCACTTGTCCAGTTCCTCCTGAACAGACAAAAGGTCCCCTGGGTATA |
| | GATCCTCAGAAAGGAATAGGAACAGCATATGAAGGTCATGTCAGGATTCCTAAGCCAG |
| | CTGGAGTGAAGAAAGGGTGGCAGAGAGCACTGGCTATAGTGTGTGACTTCAAACTCTT |
| | TCTGTACGATATTGCTGAAGGAAAAGCATCTCAGCCCAGTGTTGTCATTAGTCAAGTG |
| | ATTGACATGAGGAGGGATGAAGAATTTTCTGTGAGTTCAGTCTTGGCTTCTGATGTTA |
| | TCCATGCAAGTCGGAAAGATATACCCTGTATATTTAGGGTCACAGCTTCCCAGCTCTC |
| | AGCATCTAATAACAAATGTTCAATCCTGATGCTAGCAGACACTGAGAATGAGAAGAAT |
| | AAGTGGGTGGGAGTGCTGAGTGAATTGCACAAGATTTTGAAGAAAAACAAATTCAGAG |
| | ACCGCTCAGTCTATGTTCCCAAGAGGCTTATGACAGCACTCTAACCCCTCATTAAAAC |
| | AACCCAGGCAGCCGCAATCATAGAATCATGAAGAATTGCTTTGGGAAACGAAGAAGGG |
| | TCGTCATGTACGACTTTTTCCTATGTCAGCATTGGATGGGCGAGAGACCGATTTTTAC |
| | AAGCTGTCAGAAACTAAAGGGTGTCAAACCGTAACTTCTGGAAAGGTGCGCCATGGAG |
| | GAGCAAGACCCGTCACAGAAAATTTAAAGAAATTCAAGTCCCATATAATGTCCAGTGG |
| | ATTTATTGCACATCAACCAATGGATGCTATCTGCGCAGTTGAGATCTCCAGTAAAGAA |
| | TATCTGCTGTGTTTTAACAGCATTGGGATATACACTGACTGCCAGGGCCGAAGATCTA |
| | GACAACAGGAATTGATGTGGCCAGCAAATCCTTCCTCTTGTTGTAAGATTCTCTACAA |
| | TGCACCATATCTCTCGGTGTACAGTGPAAATGCAGTTGATATCTTTGATGTGAAACTCC |
| | ATGGAATGGATTCAGACTCTTCCTCTCAAAAAGGTACGACCCTTAAAACAATGAAGGAT |
| | CATTAAATCTTTTAGGGTTGGAGACCATTAGAATTAATATATTTCAAAAATAAGATGGC |
| | AGAAGGGGACGAACTGGTAGTACCTGTTACATCAGATAATAGTCGGAAAACAAATGGTT |
| | AGAAACATTAACAATAAGCGGCGTTATTCCTTCAGAGTCCCAGAAGAGGAAAGGATGC |
| | AGCAGAGGAGGGAAATGCTACGAGATCCAGAATGAGAAATAAATTAAATTTCTAATCC |
| | AACTAATTTTAATCACATAGCACACATGGGTCCTGGAGATGGAATACAGATCCTGAAA |
| | GATCTGCCCATGAACCCTCGGCCTCAGGAAAGTCGGACAGTATTCAGTGGCTCAGTCA |
| | GTATTCCATCTATCACCAAATCCCGCCCTGAGCCAGGCCGCTCCATGAGTGCTAGCAG |
| | TGGCTTGTCAGCATCATCCGCACAGAATGGCAGCGCATTAAAAGAGGGATTCTCTGGA |
| | GGAAGCTACAGTGCCAAGCGGCAGCCCATGCCCTCCCCGTCAGAGGGCTCTTTGTCCT |
| | CTGGAGGCATGGACCAAGGAAGTGATGCCCCAGCGAGGGACTTTGACGGAGAGGACTC |
| | TGACTCTCCGAGGCATTCCACAGCTTCCACAGTTCCAACCTAAGCAAGCCCCCCAAGC |
| | CCAGCTTCACCCCGAAAAACCAAGAGCCTCTCCCTGGAGAGCACTGACCGCGGGAGCT |
| | GGGACCCGTGAGCTGCCTCAGCACTGGGACCTCTCGCTCTCCGCTCCCTGCCACTCGC |
| | CTCCTCTCACTTTCATCTCTTCCCTCCACCTCGCCTGCTCGGCCTGAAAGCCACCAGG |
| | GGCTGGCAGCA |
| | ORF Start: ATG at 15 ORF Stop: GA at 5229 |
| | SEQ ID NO: 100 1738 aa MW at 198155.8kD |
| NOV32a. | MSGEVRLRQLEQFILDGPAQTNGQCFSVETLLDILTCLYDECNNSPLRREKNTLEYLE |
| CG18891-01 | |
| Protein | WGAKPFTSKVKQMRLHREDFEILKVIGRGAFGEVAVVKLKNADKVFAMKILNKWEMLK |
| Sequence | |
| | RAETACFREERDVLVNGDNKWITTLHYAFQDDNNLYLVMDYYVGGDLLTLLSKEEDRL |
| | PEDMARFYLAEMVIATDSVHQLHYVHRDIKPDNILMDMNGHIRLADFGSCLKLMEDGT |
| | VQSSVAVGTPDYISPEILQAMEDGKGRYGPFCDWWSLGVCMYEMLYGETRFYAESLVE |
| | TYGKTMNHKERFQFPAQVTDVSENAKDLIRRLICSRFHRLGQNGIEDFKKHPFFSGID |
| | WDNIRNCEAPYIPEVSSRTDTSNFDVDDDCLKNSETMPPPTHTAFSGHHLPFVGFTYT |
| | SSCVLSDRSCLRVTAGPTSLDLDVNVQRTLDNNLATEAYERRIKRLEQEKLELSRKLQ |
| | ESTQTVQALQYSTVDGPLTASKDLEIKNLKEEIEKLRKQVTESSHLEQQLEFANAVRQ |
| | ELDDAFRQIKAYFKQIKTLQQEREDLNKELVQASERLKNQSKELKDAHCQRKLAMQEF |
| | MEINERLTELHTQKQKLARHVRDKEEEVDLVMQKVESLRQELRRTERAKKELEVHTEA |
| | LAAEASKDRKLREQSEHYSKQLENELEGLKQKQISYSPGVCSIEHQQEITKLKTDLEK |
| | KSIFYEEELSKREGIHANEIKNLKKELHDSEGQQLALNKEIMILKDKLEKTRRESQSE |
| | REEFESEFKQQYEREKVLLTEENKKLTSELDKLTTLYENLSIHNQQLEEEVKDLADKK |
| | ESVAHWEAQITEITQWVSDEKDARWYLQALASKMTEELEALRNSSLGTRATVSFYDMP |
| | WKMRRFAKLDMSARLELQSALDAEIRAKQAIQEELNKVKASNIITEKLKDSEKKNLEL |
| | LSETEQLTKDTEELRSEKGMEHQDSQHSFLAFLNTRTDALDQFESPSCTPASKGRRVR |
| | DSTPLSVHTPTLRKKGCPGSTGFPPKRKTHQFFVKSFTTPTKCHQCTSLMVGLTRQGC |
| | SCEVCGFSCHITCVNKAPTTCPVPPEQTKGPLGIDPQKGIGTAYEGHVRIPKPAGVKK |
| | GWQRALAIVCDFKLFLYDIAEGKASQPSVVTSQVIDMRRDEEFSVSSVLASDVIHASR |
| | KDIPCIFRVTASQLSASNNKCSILMLADTENEKNKWVGVLSELHKTLKKNKFRDRSVY |
| | VPKEAYDSTLRLIKTTQAAAIIDHERTALGNEEGLFVVHVTKDEIIRVGDNKKIHQIE |
| | LIPNDQLVAVISGRNRHVRLFPMSALDGRETDFYKLSETKGCQTVTSGKVRHGALTCL |
| | CVAMKRQVLCYELFQSKTRHRKFKEIQVPYNVQWMATFSEQLCVGFQSGFLRYPLNGE |
| | GNPYSMLHSNDHTLSFTAHQPMDAICAVEISSKEYLLCFNSIGIYTDCQGRRSRQQEL |
| | MWPANPSSCCKILYNAPYLSVYSENAVDIFDVNSMEWIQTLPLKKVRPLNNEGSLNLL |
| | GLETTRLIYFKNKMAEGDELVVPETSDNSRKQMVRNINNKRRYSFRVPEEERMQQRRE |
| | MLRDPEMRNKLISNPTNPNHIAHMGPGDGIQILKDLPMNPRPQESRTVFSGSVSTPSI |
| | TKSRPEPGRSMSASSGLSASSAQNGSALKREFSGGSYSAKRQPMPSPSEGSLSSGGMD |
| | QGSDAPARDFDGEDSDSPRHSTASNSSNLSSPPSPASPRKTKSLSLESTDRGSWDP |
| | SEQ ID NO: 101 5875 bp |
| NOV32b, | AAATCGAAGCAAACATGTCTGGAGAAGTGCGTTTGAGGCAGTTGGAGCAGTTTATTTT |
| CG128891-02 | |
| DNA | GGACGGGCCCGCTCAGACCAATGGGCAGTGCTTCAGTGTGGAGACATTACTGGATATA |
| Sequence | |
| | CTCATCTGCCTTTATGATGAATGCAATAATTCTCCATTGAGAAGAGAGAAGAACATTC |
| | TCGAATACCTAGAATGGGGTGCTAAACCATTTACTTCTAkAGTGAAACAAATGCGATT |
| | ACATAGAGAAGACTTTGAAATATTAAAGGTGATTGGTCGAGGAGCTTTTGGGGAGGTT |
| | GCTGTAGTAAAACTAAAAAATGCAGATAAAGTGTTTGCCATGAAAATATTGAATAAAT |
| | GGGAAATGCTGAAAAGAGCTGAGACAGCATGTTTTCGTGAAGAAAGGGATGTATTAGT |
| | GAATGGAGACAATAAATGGATTACAACCTTGCACTATGCTTTCCAGGATGACAATAAC |
| | TTATACCTGGTTATGGATTATTATGTTGGTGGGGATTTGCTTACTCTACTCAGCAAAT |
| | TTGAAGATAGATTGCCTGAAGATATGGCTAGATTTTACTTGGCTGAGATGGTGATAGC |
| | AATTGACTCAGTTCATCAGCTACATTATGTACACAGAGACATTAAACCTGACAATATA |
| | CTGATGGATATGAATGGACATATTCGGTTAGCAGATTTTGGTTCTTGTCTGAAGCTGA |
| | TGGAAGATGGAACGGTTCAGTCCTCAGTGGCTGTAGGAACTCCAGATTATATCTCTCC |
| | TGAAATCCTTCAAGCCATGGAAGATGGAAAAGGGAGATATGGACCTGAATGTGACTGG |
| | TGGTCTTTCGGGGTCTGTATGTATGAAATGCTTTACGGAGAAACACCATTTTATGCAG |
| | AATCGCTGGTGGAGACATACGGAAAAATCATGAACCACAAAGAGAGGTTTCAGTTTCC |
| | AGCCCAAGTGACTGATGTGTCTGAAAATGCTAAGGATCTTATTCGAAGGCTCATTTGT |
| | AGCAGAGAACATCGACTTGGTCAAAATGGAATAGAAGACTTTAAGAAACACCCATTTT |
| | TCAGTGGAATTGATTGGGATAATATTCGGAACTGTGAAGCACCTTATATTCCAGAAGT |
| | TAGTAGCCCAACAGATACATCGAATTTTGATGTAGATGATGATTGTTTAAAAAATTCT |
| | GAAACGATGCCCCCACCAACACATACTGCATTTTCTGGCCACCATCTGCCATTTGTTG |
| | GTTTTACATATACTAGTAGCTGTGTACTTTCTGATCGGAGCTGTTTAAGAGTTACGGC |
| | TGGTCCCACCTCACTGGATCTTGATGTTAATGTTCAGAGGACTCTAGACAACAACTTA |
| | GGAACTGAAGCTTATGAAAGAAGAATTAAGCGCCTTGAGCAAGAAAAACTTGAACTCA |
| | GTAGAAAACTTCAAGAGTCAACACAGACTGTCCAAGCTCTGCAGTATTCAACTGTTGA |
| | TGGTCCACTAACAGCAAGCAAAGATTTAGAAATAAAAAACTTAAAAGAAGAAATTGAA |
| | AAACTAAGAAAACAAGTAACAGAATCAAGTCATTTGGAACAGCAACTTGAAGAAGCTA |
| | ATGCTGTGAGGCAAGAACTAGATGATGCTTTTAGACAAATCAAGGCTTATGAAAAACA |
| | AATCAAAACGTTACAACAAGAAAGAGAAGATCTAAATAAGGAACTAGTCCAGGCTAGT |
| | GAGCGATTAAAAAACCAATCCAAAGAGCTGAAAGACGCACACTGTCAGAGGPAACTGG |
| | CCATGCAGGAATTCATGGAGATCAATGAGCGGCTAACAGAATTGCACACCCAAAAACA |
| | GAAACTTGCTCGCCATGTCCGAGATAAGGAAGAAGAGGTGGACCTGGTGATGCAAAAA |
| | GTTGAAAGCTTAAGGCAAGAACTGCGCAGAACAGAAAGAGCCAPAAAAGAGCTGGAAG |
| | TTCATACAGAAGCTCTAGCTGCTGAAGCATCTAAAGACAGGAAGCTACGTGAACAGAG |
| | TGAGCACTATTCTAAGCAACTGGAAAATGAATTGGAGGGACTGAAGCAAAAACAAATT |
| | AGTTACTCACCAGGAGTATGCAGCATAGAACATCAGCAAGAGATAACCAAACTAAAGA |
| | CTGATTTGGAAAAGAAAAGTATCTTTTATGAAGAAGAATTATCTAAAAGAGAAGGAAT |
| | ACATGCAAATGAAATAAAAAATCTTAAGAAAGAACTGCATGATTCAGAAGCTCAGCAA |
| | CTTGCTCTCAACAAAGAAATTATGATTTTAAAAGACAAATTGGAAAAAACCAGAAGAG |
| | AAAGTCAAAGTGAAAGGGAGGAATTTGAAAGTGAGTTCAAACAACAATATGAACGAGA |
| | AAAAGTGTTGTTAACTGAAGAAAATAAAAAGCTGACGAGTGAACTTGATAAGCTTACT |
| | ACTTTGTATGAGAACTTAAGTATACACAACCAGCAGTTAGAAGAAGAGGTTAAAGATC |
| | TAGCAGACAAGAAAGAATCAGTTGCACATTGGGAAGCCCAAATCACAGAAATAATTCA |
| | GTGGGTCAGCGATGPAAAGGATGCACGATGGTATCTTCAGGCCTTAGCTTCTAAAATG |
| | ACTGAAGAATTGGAGGCATTAAGAAATTCCAGCTTGGGTACACGAGCAACAGTAAGCT |
| | TCTATGATATGCCCTGGAAAATGCGTCGTTTTGCGAAACTGGATATGTCAGCTAGACT |
| | GGAGTTGCAGTCGGCTCTGGATGCAGAAATAAGAGCCAAACAGGCCATCCAAGAAGAG |
| | TTGAATAAAGTTAAAGCATCTAATATCATAACAGAAAAACTAAAAGATTCAGAGAAGA |
| | AGAACTTGGAACTACTCTCAGAAATCGAACAGCTGATAAAGGACACTGAAGAGCTTAG |
| | ATCTGAAAAGGGTATGGAGCACCAAGACTCACAGCATTCTTTCTTGGCATTTTTGAAT |
| | ACGCCTACCGATGCTCTGGATCAATTTGAATCTCCATCCTGTACTCCAGCTAGCAAAG |
| | GCAGACGTGTAAGAGACTCCACTCCACTTTCAGTTCACACACCAACCTTAAGGAAAAA |
| | AGGATGTCCTGGTTCAACTGGCTTTCCACCTAAGCGCAAGACTCACCAGTTTTTTGTA |
| | AAATCTTTTACTACTCCTACCAAGTGTCATCAGTGTACCTCCTTGATGGTGGGTTTAA |
| | TAAGACAGGGCTGTTCATGTGAAGTGTGTGGATTCTCATGCCATATAACTTGTGTAAA |
| | CAAAGCTCCAACCACTTGTCCAGTTCCTCCTGAACAGACAAAAGGTCCCCTCGGTATA |
| | GATCCTCAGAAAGGAATAGGAACAGCATATGAAGGTCATGTCAGGATTCCTAAGCCAG |
| | CTGGAGTGAAGAAGGGTGGCAGAGAGCACTGGCTATAGTGTGTGACTTCAAAACTCTT |
| | TCTGTACGATATTGCTGGAGGAAAAGCATCTCAGCCCAGTGTTGTCATTAGTCAAGTG |
| | ATTGACATGAGGGATGAAGAATTTTCTGTGAGTTCAGTCTTGGCTTCTGATGTTATCC |
| | ATGCAAGTCGAAAAGATATACCCTGTATATTTAGGGTCACAGCTTCCCAGCTCTCAGC |
| | ATCTAATAACAAATGTTCAATCCTGATGCTAGCAGACACTGAGAATGAGAAGAATAAG |
| | TGGGTGGGAGTGCTGAGTGAATTGCACAAGATTTTGAAGAAAAACAAATTCAGAGACC |
| | GCTCAGTCTATGTTCCCAAAGAGGCTTATGACAGCACTCTACCCCTCATTAAAACAAC |
| | CCAGGCAGCCGCAATCATAGATCATGAAGAATTGCTTTGGGAACGAAAGAAAGGGTTA |
| | TTTGTTGTACATGTCACCAAGATGAATTATTAGAGTTGGTGACAATAAAGAAAGATTC |
| | ATCAGATTGAACTCATTCCAAATGATCAGCTTGTTGCTGTGATCTCAGGACGAAATCG |
| | TCATGTACGACTTTTTCCTATGTCAGCATTGGATGGGCGACAGACCGATTTTTACAAG |
| | CTCTCAGAAACTAAAGGGTGTCAAACCGTAACTTCTGGAAAGGTGCGCCATGGAGCTC |
| | TCACATGCCTGTGTGTGGCTATGAAAAGGCAGGTCCTCTGTTATGAACTATTTCAGAG |
| | CAAGACCCGTCACAGAAAATTTAAAGAAATTCAAGTCCCATATAATGTCCAGTGGATG |
| | GCAATCTTCAGTGAACAACTCTGTGTGGGATTCCAGTCAGGATTTCTAAGATACCCCT |
| | TGAATGGAGAGGAAATCCATACAGTATGCTCCATTCAAAATGACCATACACTATCATT |
| | TATTGCACATCAACCAATGGATGCTATCTGCGCAGTTGAGATCTCCAGTAAAGAATAT |
| | CTGCTGTGTTTTAACAGCATTGGGATATACACTGACTGCCAGGGCCGAAGATCTAGAC |
| | AACAGGAATTGATGTGGCCAGCAAATCCTTCCTCTTGTTGTTACAATGCACCATATCT |
| | CTCGGTGTACAGTGAAAATGCAGTTGATATCTTTGATGTGAAACTCCATGGATGGATT |
| | CAGACTCTTCCTCTCAAAAAGGTTCGACCCTTAAACAATGAAGGATCATTAAATCTTT |
| | TAGGGTTGGAGACCATTAGATTAATATATTTCAAATAAAGATGGCAGAAAGGGGACGA |
| | ACTGGTAGTACCTGAAACATCAGATAATAGTCGGAAACAAATGGTTAGAAACATTAAC |
| | AATAAGCGGCGTTATTCCTTCAGAGTCCCAGAAGAGGAAAGGATGCAGCAGAGGAGGG |
| | AAATGCTACGAGATCCAGAATGAGAATAAATTAAATTTCTAAATCCAACTAATTTTAA |
| | TCACATAGCACACATGGGTCCTGGAGATGGAATACAGATCCTGAAAGATCTGCCCATG |
| | AACCCTCGGCCTCAGGAAAGTCGGACAGTATTCAGTGGCTCAGTCAGTATTCCATCTA |
| | TCACCAAATCCCGCCCTGAGCCAGGCCGCTCCATGAGTGCTAGCAGTGGCTTGTCAGC |
| | AAGTAAGTGCCGGGGCTACAGGAAGGTGCCTCTGAGACAGGGTGACCCCCAGCTCCCT |
| | CCCCTCCTGTCCCGTGGGTGACATGTCCTTCACTTACGTGTGCCCATTGCATTCTCAA |
| | GTCGCTGCAGTGTCTCAGACCCTGCTGGGTAATGCCTAATAGGCACAAATGCAGTTGT |
| | TAAGAAAATAGTCCCAGAGTCCTTCTAGAGTGTACAGGCCATCTGGGAGACAGACAAA |
| | TATGATTACAAATTGTGATGATAAGGCTCTGAAGGAAGTAAACAGCATACATTAAATA |
| | GAGAATAACAAGGGGTAGCTGTTAGGGATGAATCCCTACTTGGCAGAATAATTAGGAA |
| | AATCACTCCCTAGAGGTGGAGTCATGTTTGAGTAATGTTTGGTTAACTGAAAGAAGGC |
| | TAGTATGGCTACATGGTAGTGGTGAGGAAGTAACAAAAATTAGAGCGGGGTAGCAGGT |
| | AAGGGTCAGACCAGCAGGGACTTGAAGACCAAGGTAAGACATTTTTTACTTTATTCAA |
| | AAGGAAAAGGAAGACTTTTAAGTAGGGAAGAATTTTCTTTCAATTTACATTCTTAAAA |
| | CAATCCTGCGGGCTGCCAAGTGGAGAATGGACTAGAGGCAGGAAGAGTGGAAGCCAGC |
| | ATCCAGATAGGAGACTCCTAGAGTGGTCCCAATGGAAACCAATGAGGGCTTGGGATGC |
| | AGCAGGGGCAGAAGGAGAGAAGATGGTAGATTCTCCAGATATATTTTCAGAGTTAAAA |
| | GCAGTAAGACTTGATGATGAATTAGTCATGGAAAGTAAGGGAGAGAGTTAAAAGATGA |
| | CTCCCAGACTTCCTGCTAGGGCCTTAGTATGATACCATTTACTCCCATTTACCACCGT |
| | TTAGAAGGGGCTGAGGCAGGACATTCCACGCATGTCCAAAAGGTCCCGAGGTAGCAAA |
| | AAAAAAAAAAAAAAAA |
| | ORE Start: ATG at 15 ORF Stop: TGA at 5007 |
| | SEQ ID NO: 102 1664 aa MW at 190605.2kD |
| NOV32b, | MSGEVRLRQLEQFILDGPAQTNGQCFSVETLLDILICLYDECNNSPLRREKNILEYLE |
| CG128891-02 | |
| Protein | WGAKPFTSKVKQMRLHREDFEILKVIGRGAFGEVAVVKLKNADKVFAMKILNKWEMLK |
| Sequence | |
| | RAETACFREERDVLVNGDNKWITTLHYAFQDDNNLYLVMDYYVGGDLLTLLSKFEDRL |
| | PEDMARFYLAEMVIAIDSVHQLHYVHRDTKPDNILMDMNGHIRLADPGSCLKLMEDGT |
| | VQSSVAVGTPDYISPEILQAMEDGKGRYGRECDWWSLGVCMYEMLYGETPFYAESLVE |
| | TYGKTMNHKERPQPPAQVTDVSENAKDLIRRLICSREHRLGQNGIEDFKKHPFFSGID |
| | WDNIRNCEAPYTPEVSSPTDTSNFDVDDDCLKNSETMPPPTHTAPSGHHLPPVGFTYT |
| | SSCVLSDRSCLRVTAGPTSLDLDVNVQRTLDNNLATEAYERRIKRLEQEKLELSRKLQ |
| | ESTQTVQALQYSTVDGPLTASKDLFIKNLKEEIEKLRKQVTESSHLEQQLEEANAVRQ |
| | ELDDAPRQIKAYEKQIKTLQQEREDLNKELVQASERLKNQSKELKDAHCQRKLAMQEF |
| | MEINERLTELHTQKQKLARHVRDKEEEVDLVMQKVESLRQELRRTERAKKELEVHTEA |
| | LAAEASKDRKLREQSEHYSKQLENELFGLKQKQISYSPGVCSIEHQQEITKLKTDLEK |
| | KSIFYEEELSKREGIHANETKNLKKELHDSEGQQLALNKEIMILKDKLEKTRRESQSE |
| | REEFESEFKQQYEREKVLLTFENKKLTSELDKLTTLYENLSTHNQQLEEEVKDLADKK |
| | ESVAHWEAQITEIIQWVSDEKDARWYLQALASKMTEELEALRNSSLGTRATVSFYDMP |
| | WKMRRFAKLDMSARLELQSALDAEIRAKQAIQEELNKVKASNIITEKLKDSEKKNLEL |
| | LSEIEQLIKDTEELRSEKGMEHQDSQHSFLAPLNTPTDALDQFESPSCTPASKGRRVR |
| | DSTPLSVHTPTLRKKGCPGSTGFRRKRKTHQFFVKSPTTPTKCHQCTSLMVGLIRQGC |
| | SCEVCGFSCHITCVNKAPTTCRVPPEQTKGPLGIDPQKGIGTAYEGHVRIPKPAGVKK |
| | GWQRALAIVCDFKLFLYDIAGGKASQPSVVISQVIDMRDEEFSVSSVLASDVTHASRK |
| | DIPCIFRVTASQLSASNNKCSILMLADTENEKNKWVGVLSELHKILKKNKFRDRSVYV |
| | PKEAYDSTLRLIKTTQAAAIIDHERIALGNEEGLPVVHVTKDEIIRVGDNKKIHQIEL |
| | IPNDQLVAVISGRNRHVRLFRMSALDGRETDFYKLSETKGCQTVTSGKVRHGALTCLC |
| | VAMKRQVLCYELFQSKTRHRKPKEIQVPYNVQWMAIFSEQLCVGFQSCPLRYPLNGEG |
| | NPYSMLHSNDHTLSFIAHQPMDAICAVEISSKEYLLCFNSIGIYTDCQGRRSRQQELM |
| | WPANPSSCCYNARYLSVYSENAVDIFDVNSMEWIQTLPLKKVRPLNNEGSLNLLGLET |
| | IRLIYFKNKMAEGDELVVRFTSDNSRKQMVRNINNKRRYSFRVPEEERMQQRREMLRD |
| | PEMRNKLISNPTNFNHIAHMGPGDGIQILKDLPMNRRPQESRTVFSGSVSIPSITKSR |
| | PEPGRSMSASSGLSASKCRGYRKVPLRQGDPQLPPLLSRG |
| | SEQ ID NO: 103 874 bp |
| NOV32c, | CACCGGATCCAAAACAACCCAGGCAGCCGCAATCATAGATCATGAAAGAATTGCTTTG |
| 276585662 | |
| DNA | GGAACGAAGAAGGGTTATTTGTTGTACATGTCACCAAAGATGAAATTAATTAGAGTTG |
| Sequence | |
| | GTGACAATAAGAAGATTCATCAGATTGAACTCATTCCAAATGATCAGCTTGTTGCTGT |
| | GATCTCAGGACGAAATCGTCATGTACGACTTTTTCCTATCTCAGCATTGGATGGGCGA |
| | GAGACCGATTTTTACAAGCTGTCAGAAACTAAAGGGTGTCAAACCGTAACTTCTGGAA |
| | AGGTGCGCCATGGAGCTCTCACATGCCTGTGTGTGGCTATGAAAAGGCAGGTCCTCTG |
| | TTATGAACTATTTCAGAGCAAGACCCGTCACAGAAAATTTAAAGAAATTCAAGTCACA |
| | TATAATGTCCAGTGGATGGCAATCTTCAGTGAACAACTCTGTGTGGGATTCCAGTCAG |
| | GATTTCTAAGATACCCCTTGAATGGAGAAGGAAATCCATACAGTATGCTCCATTCAAA |
| | TGACCATACACTATCATTTATTGCACATCAACCAATGGATGCTATCTGCGCAGTTGAG |
| | ATCTCCAGTAAAGAATATCTGCTGTGTTTTAACAGCATTGGGATATACACTGACTGCC |
| | AGGGCCGAAGATCTAGACAACAGGAATTGATGTGGCCAGCAAATCCTTCCTCTTGTTG |
| | TTACAATGCACCATATCTCTCGGTGTACAGTGAAAATGCAGTTGATATCTTTGATGTG |
| | AACTCCATGGAATGGATTCAGACTCTTCCTCTCAAAAAGGTTCGACCCTTAAACAATG |
| | AAGGATCATTAATCTTTTAGGGTTGGAGACCATTAGATTAAATATATTTCAAACTCGA |
| | GGGC |
| | ORE Start: at 2 ORE Stop: end of sequence |
| | SEQ ID NO: 104 291 aa MW at 33043.6kD |
| NOV32c, | TGSKTTQAAAIIDHERIALGNEEGLFVVHVTKDEIIRVGDNKKIHQIELTPNDQLVAV |
| 276585662 | |
| Protein | LSGRNRHVRLFPMSALDGRETDFYKLSETKGCQTVTSGKVRHGALTCLCVAMKRQVLC |
| Sequence | |
| | YELFQSKTRHRKFKEIQVPYNVQWMATFSEQLCVGFQ8GELRYPLNGEGNPYSMLHSN |
| | DHTLSFIAHQPMDAICAVEISSKEYLLCFNSIGIYTDCQGRRSRQQELMWPANPSSCC |
| | YNAPYLSVYSENAVDIFDVNSMEWIQTLPLKKVRPLNNEGSLNLLGLETIRLIYFKLE |
| | G |

[0489] Sequence comparison of the above protein sequences yields the following sequence relationships shown in Table 32B.

TABLE 32B
Comparison of NOV32a against NOV32b and NOV32c

| | | Identities/ |
|---|---|---|
| Protein | NOV32a Residues/ | Similarities for |
| Sequence | Match Residues | the Matched Region |
| NOV32b | 1 . . . 1633 | 1566/1633 (95%) |
| | 1 . . . 1629 | 1566/1633 (95%) |
| NOV32c | 1232 . . . 1519 | 272/288 (94%) |
| | 4 . . . 288 | 272/288 (94%) |

[0490] Further analysis of the NOV32a protein yielded the following properties shown in Table 32C.

TABLE 32C
Protein Sequence Properties NOV32a

| | |
|---|---|
| PSort | 0.9800 probability located in nucleus; 0.3000 probability |
| analysis: | located in microbody (peroxisome); 0.1000 probability located |
| | in mitochondrial matrix space; 0.1000 probability located in |
| | lysosome (lumen) |
| SignalP | No Known Signal Sequence Predicted |
| analysis: | |

[0491] A search of the NOV32a protein against the Geneseq database, a proprietary database that contains sequences published in patents and patent publication, yielded several homologous proteins shown in Table 32D.

TABLE 32D
Geneseq Results for NOV32a

| | | NOV32a | | |
|---|---|---|---|---|
| | Protein/Organism/ | Residues/ | Identities/ | |
| Geneseq | Length [Patent #, | Match | Similarities for | Expect |
| Identifier | Date] | Residues | the Matched Region | Value |
| AAE21707 | Human PKIN-2 protein-Homo | 1 . . . 1738 | 1712/1740 (98%) | 0.0 |
| | sapiens, 1719 aa. [WO200218557-A2, | 1 . . . 1719 | 1714/1740 (98%) | |
| | 7 Mar. 2002] | | | |
| AAB42069 | Human ORFX ORF1833 polypeptide | 1 . . . 1737 | 1062/1779 (59%) | 0.0 |
| | sequence SEQ ID NO: 3666-Homo | 1 . . . 1727 | 1349/1779 (75%) | |
| | sapiens, 1728 aa. [WO200058473-A2, | | | |
| | 5 Oct. 2000] | | | |
| ABG13880 | Novel human diagnostic protein | 1 . . . 1602 | 1017/1626 (62%) | 0.0 |
| | #13871-Homo sapiens, 1797 aa. | 1 . . . 1607 | 1286/1626 (78%) | |
| | [WO200175067-A2, 11 Oct. 2001] | | | |
| ABB13880 | Novel human diagnostic protein | 1 . . . 1602 | 1017/1626 (62%) | 0.0 |
| | #13871-Homo sapiens, 1797 aa. | 1 . . . 1607 | 1286/1626 (78%) | |
| | [WO200175067-A2, 11 Oct. 2001] | | | |
| ABB60342 | Drosophila melanogaster polypeptide | 21 . . . 1627 | 684/1688 (40%) | 0.0 |
| | SEQ ID NO 7818-Drosophila | 44 . . . 1599 | 988/1688 (58%) | |
| | melanogaster, 1637 aa. | | | |
| | [WO200171042-A2, 27 Sep. 2001] | | | |

[0492] In a BLAST search of public sequence databases, the NOV32a protein was found to have homology to the proteins shown in the BLASTP data in Table 32E.

TABLE 32E
Public BLASTP Results for NOV32a

| | | NOV32a | Identities/ | |
|---|---|---|---|---|
| Protein | | Residues/ | Similarities for | |
| Accession | | Match | the Matched | Expect |
| Number | Protein/Organism/Length | Residues | Portion | Value |
| O54874 | Mytonic dystrophy kinase-related | 1 . . . 1738 | 1657/1741 (95%) | 0.0 |
| | Cdc42-binding kinase-Rattus | 1 . . . 1732 | 1700/1741 (97%) | |
| | norvegicus (Rat), 1732 aa. | | | |
| Q9ULU5 | K1AA1124 protein-Homo sapiens | 1 . . . 1737 | 1062/1762 (60%) | 0.0 |
| | (Human), 1760 aa (fragment). | 50 . . . 1759 | 1349/1762 (76%) | |
| Q9Y5S2 | CDC42-binding protein kinase beta- | 1 . . . 1737 | 1061/1762 (60%) | 0.0 |
| | Homo sapiens (Human), 1711 aa. | 1 . . . 1710 | 1349/1762 (76%) | |
| O54875 | Myotonic dystrophy kinase-related | 1 . . . 1726 | 1050/1748 (60%) | 0.0 |
| | Cdc42-binding kinase MRCK-beta- | 1 . . . 1702 | 1334/1748 (76%) | |
| | Rattus norvegicus (Rat), 1702 aa. | | | |
| Q9W1B0 | GEK protein (LD24220P)- | 21 . . . 1627 | 684/1688 (40%) | 0.0 |
| | Drosophila melanogaster (Fruit fly), | 44 . . . 1599 | 988/1688 (58%) | |
| | 1637 aa. | | | |

[0493] PFam analysis predicts that the NOV32a protein contains the domains shown in the Table 32F.

TABLE 32F
Domain Analysis of NOV32a

| | | Identities/ | |
|---|---|---|---|
| Pfam | NOV32a | Similarities for | Expect |
| Domain | Match Region | the Matched Region | Value |
| Pkinase | 78 . . . 344 | 86/303 (28%) | 1.9e−61 |
| | | 205/303 (68%) | |
| pkinase_C | 345 . . . 373 | 16/31 (52%) | 2.3e−08 |
| | | 25/31 (81%) | |
| K-box | 468 . . . 554 | 23/105 (22%) | 0.34 |
| | | 54/105 (51%) | |
| DAG_PE-bind | 1016 . . . 1065 | 21/51 (41%) | 1.9e−14 |
| | | 38/51 (75%) | |
| PH | 1086 . . . 1205 | 16/120 (13%) | 1.2e−06 |
| | | 82/120 (68%) | |
| CNH | 1232 . . . 1519 | 64/381 (17%) | 1.4e−11 |
| | | 188/381 (49%) | |

### Example 33

[0494] The NOV33 clone was analyzed and the nucleotide and encoded polypeptide sequences are shown in Table 33A.

TABLE 33A
NOV33 Sequence Analysis

| | |
|---|---|
| | SEQ ID NO: 105 3117 bp |
| NOV33a. | TAGGAGTGAACACTGCACAGGAATCTCTGCCCATCTCAGGAGAAACCAAACTTGGGGA |
| CG131490-01 | |
| DNA | AAATGTTTGCGGTCCACTTGATGGCATTTTACTTCAGCAAGCTGAAGGAGGACCAGAT |
| Sequence | |
| | CAAGAAGGTGGACAGGTTCCTGTATCACATGCGGCTCTCCGATGACACCCTTTTGGAC |
| | ATCATGAGGCGGTTCCGGGCTGAGATGGAGAAGGGCCTGGCAAAGGACACCAACCCCA |
| | CGGCTGCAGTGAAGATGTTGCCCACCTTCGTCAGGGCCATTCCCGATGGTTCCGAAAA |
| | TGGGGAGTTCCTTTCCCTGGATCTCGGAGGGTCCAAGTTCCGAGTGCTGAAGGTGCAA |
| | GTCGCTGAAGAGGGGAAGCGACACGTGCAGATGGAGAGTCAGTTCTACCCAACGCCCA |
| | ATGAAATCATCCGCGGGAACGGCACAGAGCTGTTTGAATATGTAGCTGACTGTCTGGC |
| | AGATTTCATGAAGACCNAGATTTAAGCATAAGAAAAATTGCCCCTTGGCCTAACTTTT |
| | TCTTTCCCCTGTCGACAGACTAAACTGGAAGAGGGTGTCCTACTTTCGTGGACAAAAA |
| | AGTTTAAGGCACGAGGAGTTCAGGACACGGATGTGGTGAGCCGTCTGACCAAAGCCAT |
| | GAGAAGACACAAGGACATGGACGTGGACATCCTGGCCCTGGTCAATGACACCGTGGGG |
| | ACCATGATGACCTGTGCCTATGACGACCCCTACTGCGAAGTTGGTGTCATCATCGGAA |
| | CTGGCACCAATGCGTGTTACATGGAGGACATGAGCAACATTGACCTGGTGGAGGGCGA |
| | CGAGGGCAGGATGTGCATCAACACAGAGTGGGGGGCCTTCGGGGACGACGGGGCCCTG |
| | GAGGACATTCGCACTGAGTTCGACAGGGAGCTGGACCTCGGCTCTCTCAACCCAGGAA |
| | AGCAACTGTTCGAGAAGATGATCAGTGGCCTGTACCTGGGGGAGCTTGTCAGGCTTAT |
| | CTTGCTGAAGATGGCCAAGGCTGGCCTCCTGTTTGGTGGTGAGAAATCTTCTGCTCTC |
| | CACACTAAGGGCAAGATCGAAACACGGCACGTGGCTGCCATGGAGAAGTATAAAGAAG |
| | GCCTTGCTAATACAAGAGAGATCCTGGTGGACCTGGGTCTGGAACCGTCTGAGGCTGA |
| | CTGCATTGCCGTCCAGCATGTCTGTACCATCGTCTCCTTCCGCTCGGCCAATCTCTGT |
| | GCAGCAGCTCTGGCGGCCATCCTGACACGCCTCCGGGAGAACAAGAAGGTGGAACGGC |
| | TCCGGACCACAGTGGGCATGGACGGCACCCTCTACAAGATACACCCTCAGTACCCAAA |
| | ACGCCTGCACAAGGTGGTGAGGAAACTGGTCCCAAGCTGTGATGTCCGCTTCCTCCTG |
| | TCAGAGAGTGGCAGCACCAAGGGGGCCGCCATGGTGACCGCGGTGGCCTCCCGCGTGC |
| | AGGCCCAGCGGAAGCAGATCGACAGGGTGCTGGCTTTGTTCCAGCTGACCCGAGAGCA |
| | GCTCGTGGACGTGCAGGCCAAGATGCGGGCTGAGCTGGAGTATGGGCTGAAGAAGAAG |
| | AGCCACGGGCTGGCCACGGTCAGGATGCTGCCCACCTACGTCTGCGGGCTGCCGGACG |
| | GCACAGAGAAAGGAAAGTTTCTCGCCCTGGATCTTGGGGGAACCAACTTCCGGGTCCT |
| | CCTGGTGAAGATCAGAAGTGGACGGAGGTCAGTGCGPATGTACAACAAGATCTTCGCC |
| | ATCCCCCTGGAGATCATGCAGGGCACTGGTGAGGAGCTCTTTGATCACATTGTGCAGT |
| | GCATCGCCGACTTCCTGGACTACATGGGCCTCAAGGGAGCCTCCCTACCTTTGGGCTT |
| | CACATTCTCATTTCCCTGCAGGCAGATGAGCATTGACAAGGGAACACTCATAGGGTGG |
| | ACCAAAGGTTTCAAGGCCACTGACTGTGAAGGGGAGGACGTGGTGGACATGCTCAGGG |
| | AAGCCATCAAGAGGAGAAACGAGTTTGACCTGGACATTGTTGCAGTCGTGAATGATAC |
| | AGTGGGGACCATGATGACCTGTGGCTATGAAGATCCTAATTGTGAGATTGGCCTGATT |
| | GCAGGAACAGGCAGCAACATGTGCTACATGGAGGACATGAGGAACATCGAGATGGTGG |
| | AGGGGGGTGAAGGGAAGATGTGCATCAATACAGAGTGGGGAGGATTTGGAGACAATGG |
| | CTGCATAGATGACATCTGGACCCGATACGACACGGAGGTGGATGAGGGGTCCTTGAAT |
| | CCTGGCAAGCAGAGATACGAGAAAATGACCAGTGGGATGTACTTGGGGGAGATTGTGC |
| | GGCAGATCCTGATCGACCTGACCAAGCAGGGTCTCCTCTTCCGAGGGCAGATTTCAGA |
| | GCGTCTCCGGACCAGGGGCATCTTCGAAACCAAGTTCCTGTcCCAGATCGAAAGCGAT |
| | CGGCTGGCCCTTCTCCAGGTCAGGAGGATTCTGCAGCAGCTGGGCCTGGACAGCACGT |
| | GTGAGGACAGCATCGTGGTGAAGGAGGTGTGCGGACGCGTGTCCCGGCGGGCGGCCCA |
| | GCTCTGCGGTGCTGGCCTGGCCGCTATAGTGGAAAAAAGGAGAGAAGACCAGGGGCTA |
| | GAGCACCTGAGGATCACTGTGGGTGTGGACGGCACCCTGTACAAGCTGCACCCTCACT |
| | TTTCTAGAATATTGCAGGAAACTGTGAAGGAACTAGCCCCTCGATGTGATGTGACATT |
| | CATGCTGTCAGAAGATGGCAGTGGAAAAGGGGCAGCACTGATCACTGCTGTGGCCAAG |
| | AGGTTACAGCAGGCACAGAAGGAGAACTAGGAACCCCTGGGATTGGACCTGATGCATC |
| | TTGGATACTGAACAGCTTTTCCTCTGGCAGATCAGTTGGTCAGAGAGCAATCGGCACC |
| | CTCCTGGCTGACCTCACCTTCTGGATGGCCGAAAGAGAACCCCAGGTTCTCGGGTACT |
| | CTTAGTATCTTGTACTGGATTTGCAGTGACATTACATGACATCTCTATTTGGTATATT |
| | TGGGCCAAAATGGGCCAACTTATGAAATCAAAGTGTCTGTCCTGAGAGATCCCCTTTC |
| | AACACATTGTTCAGGTGAGGCTTGAGCTGTCAATTCTCTATGG |
| | ORF Start: ATG at 61 ORF Stop: TAG at 2812 |
| | SEQ ID NO: 106 917 aa MW at 102628.8kD |
| NOV33a. | MFAVHLMAFYFSKLKEDQIKKVDRFLYHMRLSDDTLLDIMRRFRAEMEKGLAKDTNPT |
| CG131490-01 | |
| Protein | AAVKMLPTFVRAIPDGSENGEFLSLDLGGSKFRVLKVQVAEEGKRHVQMESQFYPTPN |
| Sequence | |
| | EIIRGNGTELFEYVADCLADFMKTKDLKHKKLPLGLTFSFPCRQTKLEEGVLLSWTKK |
| | FKARGVQDTDVVSRLTKAMRRHKDMDVDILALVNDTVGTMMTCAYDDPYCEVGVIIGT |
| | GTNACYMEDMSNIDLVEGDEGRMCINTEWGAPGDDGALEDIRTEFDRELDLGSLNPGK |
| | QLFEKMTSGLYLGELVRLILLKMAKAGLLPGGEKSSALHTKGKIETRHVAAMEKYKEG |
| | LANTREILVDLGLEPSEADCIAVQHVCTIVSFRSANLCAAALAATLTRLRENKKVERL |
| | RTTVGMDGTLYKIHRQYPKRLHKVVRKLVPSCDVRFLLSESGSTKGAAMVTAVASRVQ |
| | AQRKQTDRVLALFQLTREQLVDVQAKMRAELFYGLKKKSHGLATVRMLPTYVCGLPDG |
| | TEKGKFLALDLGGTNFRVLLVKIRSGRRSVRMYNKIFAIPLEIMQGTGEELFDHIVQC |
| | TADPLDYMGLKGASLPLGFTFSFPCRQMSIDKGTLIGWTKGFKATDCEGEDVVDMLRE |
| | ATKRRNEFDLDIVAVVNDTVGTMMTCGYEDPNCEIGLIAGTGSNMCYMEDMRNIEMVE |
| | GGEGKMCTNTEWGGFGDNGCTDDTWTRYDTEVDEGSLNPGKQRYEKMTSGMYLGETVR |
| | QILIDLTKQGLLFRGQISERLRTRGIFETKFLSQIESDRLALLQVRRILQQLGLDSTC |
| | EDSIVVKEVCGRVSRRAAQLCGAGLAATVEKRREDQGLEHLRITVGVDGTLYKLHPHF |
| | SRILQETVKELAPRCDVTFMLSEDGSGKGAALTTAVAKRLQQAQKEN |
| | SEQ ID NO: 107 2277 bp |
| NOV33b, | TAGGAGTGAACACTGCACAGGAATCTCTGCCCATCTCAGGAGAAACCAAACTTGGGGA |
| CG131490-02 | |
| DNA | AAATGTTTGCGGTCCACTTGATGGCATTTTACTTCAGCAAGCTGAAGGAGGACCAGAT |
| Sequence | |
| | CAAGAAGGTGGACAGGTTCCTGTATCACATGCGGCTCTCCGATGACACCCTTTTGGAC |
| | ATCATGAGGCGGTTCCGGGCTGAGATGGAGAAGGGCCTGGCAAAGGACACCAACCCCA |
| | CGGCTGCAGTGAAGATGTTGCCCACCTTCGTCAGGGCCATTCCCGATGGTTCCGAAAA |
| | TGGGGAGTTCCTTTCCCTGGATCTCGGAGGGTCCAAGTTCCGAGTGCTGAAGGTGCAA |
| | GTCGCTGAAGAGGGGAAGCGACACGTGCAGATGGAGAGTCAGTTCTACCCAACGCCCA |
| | ATGAAATCATCCGCGGGAACGGCACAGAGCTGTTTGAATATGTAGCTGACTGTCTGGC |
| | AGATTTCATGAAGACCAAAGATTTAAAGCATAAGAAATTGCCCCTTGGCCTAACTTTT |
| | TCTTTCCCCTGTCGACAGACTAAACTGGAAGAGGGTGTCCTACTTTCGTGGACAAAAA |
| | AGTTTAAGGCACGAGGAGTTCAGGACACGGATGTGGTGAGCCGTCTGACCAAAGCCAT |
| | GAGAAGACACAAGGACATGGACGTGGACATCCTGGCCCTGGTCAATGACACCGTGGGG |
| | ACCATGATGACCTGTGCCTATGACGACCCCTACTGCGAAGTTGGTGTCATCATCGGAA |
| | CTGGCACCAATGCGTGTTACATGGAGGACATGAGCAACATTGACCTGGTGGAGGGCGA |
| | CGAGGGCAGGATGTGCATCAACACAGAGTGGGGGGCCTTCGGGGACGACGGGGCCCTG |
| | GAGGACATTCGCACTGAGTTCGACAGGGAGCTGGACCTCGGCTCTCTCAACCCAGGAA |
| | AGCAACTGTTCGAGAAGATGATCAGTGGCCTGTACCTGGGGGAGCTTGTCAGGCTTAT |
| | CTTGCTGAAGATGGCCAAGGCTGGCCTCCTGTTTGGTGGTGAGAAATCTTCTGCTCTC |
| | CACACTAAGGGCAAGATCGAACACGGCACGTGGCTGCCATGGAGAAGTATAAAAGAAG |
| | GCCTTGCTAATACAAGAGAGATCCTGGTGGACCTGGGTCTGGAACCGTCTGAGGCTGA |
| | CTGCATTGCCGTCCAGCATGTCTGTACCATCGTCTCCTTCCGCTCGGCCAATCTCTGT |
| | GCAGCAGCTCTGGCGGCCATCCTGACACGCCTCCGGGAGAACAAGAAGGTGGAACGGC |
| | TCCGGACCACAGTGGGCATGGACGGCACCCTCTACAAGATACACCCTCAGTACCCAAA |
| | ACGCCTGCACAAGGTGGTGAGGAAACTGGTCCCAAGCTGTGATGTCCGCTTCCTCCTG |
| | TCAGAGAGTGGCAGCACCAAGGGGGCCGCCATGGTGACCGCGGTGGCCTCCCGCGTGC |
| | AGGCCCAGCGGAAGCAGATCGACAGGGTGCTGGCTTTGTTCCAGCTGACCCGAGAGCA |
| | GCTCGTGGACGTGCAGGCCAAGATGCGGGCTGAGCTGGAGTATGGGCTGAAGAAGAAG |
| | AGCCACGGGCTGGCCACGGTCAGGATGCTGCCCACCTACGTCTGCGGGCTGCCGGACG |
| | GCACAGAGAAAGGAAAGTTTCTCGCCCTGGATCTTGGGGGAACCAACTTCCGGGTCCT |
| | CCTGGTGAAGATCAGAAGTGGACGGAGGTCAGTGCGAATGTACAACAAGATCTTCGCC |
| | ATCCCCCTGGAGATCATGCAGGGCACTGGTGAGGAGCTCTTTGATCACATTGTGCAGT |
| | GCATCGCCGACTTCCTGGACTACATGGGCCTCAAGGGAGCCTCCCTACCTTTGGGCTT |
| | CACATTCTCATTTCCCTGCAGGCAGATGAGCATTGACAAGGGAACACTCATAGGGTGG |
| | ACCAAAGGTTTCAAGGCCACTGACTGTGAAGGGGAGGACGTGGTGGACATGCTCAGGG |
| | AAGCCATCAAGAGGAGAAACGAGTTTGACCTGGACATTGTTGCAGTCGTGAATGATAC |
| | AGTGGGGACCATGATGACCTGTGGCTATGAAGATCCTAATTGTGAGATTGGCCTGATT |
| | GCAGGAACAGGCAGCAACATGTGCTACATGGAGGACATGAGGAACATCGAGATGGTGG |
| | AGGGGGGTGAAGGGAAGATGTGCATCTGTTTTTCATTTTGCCTGTGGTTTGTGTTGCA |
| | GGTGTTGATAGTTGTTTTAAGGATTGTTAGGTATAGGAAATCCAGTAAATTAATAAAA |
| | AAATTTTGATTTTCC |
| | ORF Start: ATG at 61 ORF Stop: TGA at 2269 |
| | SEQ ID NO: 108 736 aa MW at 82680.6kD |
| NOV33b, | MFAVHLMAFYFSKLKEDQTKKVDRFLYHMRLSDDTLLDTMRRFRAEMEKGLAKDTNPT |
| CG131490-02 | |
| Protein | AAVKMLPTFVRAIPDGSENGEFLSLDLGGSKFRVLKVQVAEEGKRHVQMESQFYPTPN |
| Sequence | |
| | EIIRGNGTELFEYVADCLADFMKTKDLKHKKLPLGLTFSFPCRQTKLEEGVLLSWTKK |
| | FKARGVQDTDVVSRLTKAMRRHKDMDVDILALVNDTVGTMMTCAYDDPYCEVGVIIGT |
| | GTNACYMEDMSNTDLVEGDEGRMCINTEWGAFGDDGALEDIRTEFDRELDLGSLNPGK |
| | QLPEKMISGLYLGELVRLILLKMAKAGLLFGGEKSSALHTKGKTETRHVAAMEKYKEG |
| | LANTREILVDLGLEPSEADCIAVQHVCTIVSPRSANLCAAALAAILTRLRENKKVERL |
| | RTTVGMDGTLYKIHPQYPKRLHKVVRKLVPSCDVRFLLSESGSTKGAAMVTAVASRVQ |
| | AQRKQIDRVLALFQLTREQLVDVQAKMRAELEYGLKKKSHGLATVRMLPTYVCGLPDG |
| | TEKGKFLALDLGGTNFRVLLVKIRSGRRSVRMYNKIFAIPLEIMQGTGEELFDHIVQC |
| | IADFLDYMGLKGASLPLGFTFSPPCRQMSIDKGTLIGWTKGFKATDCEGEDVVDMLRE |
| | AIKRRNEFDLDIVAVVNDTVGTMMTCGYEDPNCEIGLIAGTGSNMCYMEDMRNIEMVE |
| | GGEGKMCTCFSFCLWFVLQVLIVVLRIVRYRKSSKLIKKF |

[0495] Sequence comparison of the above protein sequences yields the following sequence relationships shown in Table 33B.

TABLE 33B
Comparison of NOV33a against NOV33b

| | | Identities/ |
|---|---|---|
| Protein | NOV33a Residues/ | Similarities for |
| Sequence | Match Residues | the Matched Region |
| NOV33b | 1 . . . 704 | 689/704 (97%) |
| | 1 . . . 704 | 689/704 (97%) |

[0496] Further analysis of the NOV33a protein yielded the following, properties shown in Table 33C.

TABLE 33C
Protein Sequence Properties NOV33a

| | |
|---|---|
| PSort | 0.6000 probability located in nucleus; 0.3000 probability |
| analysis: | located in microbody (peroxisome); 0.1000 probability located |
| | in mitochondrial matrix space; 0.1000 probability located in |
| | lysosome (lumen) |
| SignalP | Cleavage site between residues 18 and 19 |
| analysis: | |

[0497] A search of the NOV33a protein against the Geneseq database, a proprietary database that contains sequences published in patents and patent publication, yielded several homologous proteins shown in Table 33D.

TABLE 33D
Geneseq Results for NOV33a

| | | NOV33a | | |
|---|---|---|---|---|
| | Protein/Organism/ | Residues/ | Identities/ | |
| Geneseq | Length [Patent #, | Match | Similarities for | Expect |
| Identifier | Date] | Residues | the Matched Region | Value |
| AAE19159 | Human kinase polypeptide (PKIN-17)- | 1 . . . 917 | 915/917 (99%) | 0.0 |
| | Homo sapiens, 917 aa. | 1 . . . 917 | 915/917 (99%) | |
| | [WO200208399-A2, 31 Jan. 2002] | | | |
| ABB04582 | Human hexokinase 50365-Homo | 1 . . . 917 | 914/917 (99%) | 0.0 |
| | sapiens, 917 aa. [WO200190325-A2, | 1 . . . 917 | 914/917 (99%) | |
| | 29 Nov. 2001] | | | |
| ABB97216 | Novel human protein SEQ ID NO: 484- | 1 . . . 911 | 649/912 (71%) | 0.0 |
| | Homo sapiens, 917 aa. | 1 . . . 912 | 781/912 (85%) | |
| | [WO200222660-A2, 21 Mar. 2002] | | | |
| AAW37428 | Rat hexokinase I- Rattus sp, 918 aa. | 1 . . . 911 | 638/912 (69%) | 0.0 |
| | [WO9726357-A1, 24 Jul. 1997] | 1 . . . 912 | 780/912 (84%) | |
| AAW37442 | Rat hexokinase I- Rattus sp, 918 aa. | 1 . . . 911 | 638/912 (69%) | 0.0 |
| | [WO9726322-A2, 24 Jul. 1997] | 1 . . . 912 | 780/912 (84%) | |

[0498] In a BLAST search of public sequence datbases, the NOV33a protein was found to have homology to the proteins shown in the BLASTP data in Table 33E.

TABLE 33E
Public BLASTP Results for NOV33a

| | | NOV33a | Identities/ | |
|---|---|---|---|---|
| Protein | | Residues/ | Similarities for | |
| Accession | | Match | the Matched | Expect |
| Number | Protein/Organism/Length | Residues | Portion | Value |
| CAD19394 | Sequence 1 from Patent WO0190325- | 1 . . . 917 | 914/917 (99%) | 0.0 |
| | Homo sapiens (Human), 917 aa. | 1 . . . 917 | 914/917 (99%) | |
| Q91W97 | Similar to hexokinase 1-Mus | 1 . . . 916 | 834/916 (91%) | 0.0 |
| | musculus (Mouse), 915 aa. | 1 . . . 914 | 882/916 (96%) | |
| P19367 | Hexokinase,type I (EC 2.7.1.1) (HK | 1 . . . 911 | 648/912 (71%) | 0.0 |
| | 1) (Brain form hexokinase)-Homo | 1 . . . 912 | 781/912 (85%) | |
| | sapiens (Human), 917 aa. | | | |
| P05708 | Hexokinase, type I (EC 2.7.1.1) (HK | 1 . . . 911 | 642/912 (70%) | 0.0 |
| | 1) (Brain form hexokinase)-Rattus | 1 . . . 912 | 782/912 (85%) | |
| | norvegicus (Rat), 918 aa. | | | |
| Q96EH2 | Unknown (Protein for | 241 . . . 917 | 675/677 (99%) | 0.0 |
| | IMAGE: 4563921)-Homo sapiens | 1 . . . 677 | 675/677 (99%) | |
| | (Human), 677 aa (fragment). | | | |

[0499] PFam analysis predicts that the NOV33a protein contains the domains shown in the Table 33F.

TABLE 33F
Domain Analysis of NOV33a

| | | Identities/ | |
|---|---|---|---|
| Pfam | NOV33a | Similarities for | Expect |
| Domain | Match Region | the Matched Region | Value |
| hexokinase | 16 . . . 463 | 238/483 (49%) | 7.4e−249 |
| | | 400/483 (83%) | |
| hexokinase | 464 . . . 910 | 264/482 (55%) | 1.8e−280 |
| | | 406/482 (84%) | |

### Example 34

[0500] The NOV34 clone was analyzed, and the nucleotide and encoded polypeptide sequences are shown in Table 34A.

TABLE 34A
NOV34 Sequence Analysis

| | |
|---|---|
| | SEQ ID NO: 109 767 bp |
| NOV34a, | TGAACTGAAAATCAGAATCCTGGGCCTCACTCCCAGAGGATCTGATCTACATGTGTGG |
| CG131881-01 | |
| DNA | AGATGCCCAGGAATCTGCTTTATTCTCTTTTGTCCTCCCACCTGTCCCCCCATTTCAG |
| Sequence | |
| | CACCTCGGTAACCTCTGCCAAAGTGGCTGTGAATGGCGTTCAGCTGCATTACCAGCAG |
| | ACTGCAGAGGGAGATCACGCAGTCCTGCTACTTCCTGGGATGTTAGGAAGTGGAGAGA |
| | CTGATTTTGGACCTCAGCTCAGAACCTCAATAAGAAGCTCTTCAACGGTGGTCGCCTG |
| | GGATCCTCGAGGCTATGGACATTCCAGGCCCCCAGATCGCGATTTCCCAGCAGACTTT |
| | TTTGAAAGGGATGCAAAGATGCCTGTTGATTTGATGAAGGCGCTGAAGTTTAAGAAGG |
| | TTTCTCTGCTGGGGTGGAGTGATGGGGGCATAACCGCACTCATTGCTGCTGCAAAATA |
| | TCCATCTTACATCCACAAGATGGTGATCTGGGGCGCCAACGCCTACGTCACTGACGAA |
| | GACAGCATGATATATGAGGGTAAAATCTGCCGGCACCTGCTGCCCCGGGTCCAGTGCC |
| | CCGCCTTGATTGTGCACGGTGAGAAGGATCCTCTGGTCCCACGGTTTCATGCCGACTT |
| | CATTCATAAGCACGTGAAAGGCTCACGGCTGCATTTGATGCCAGAAGGCAAACACAAC |
| | CTGCATTTGCGTTTTGCAGATGAATTCAACAAGTTAGCAGAAGACTTCCTACAATGAG |
| | AATGCACACTCTC |
| | ORF Start: ATG at 61 ORF Stop: TGA at 751 |
| | SEQ ID NO: 110 230 aa MW at 25792.4kD |
| NOV34a, | MPRNLLYSLLSSHLSPHFSTSVTSAKVAVNGVQLHYQQTGEGDHAVLLLRGMLGSGET |
| CG131881-01 | |
| Protein | DFGPQLKNLNKKLFTVVAWDPRGYGHSRPPDRDFPADFFERDAKDAVDLMKALKFKKV |
| Sequence | |
| | SLLGWSDGGITALTAAAKYPSYTHKMVTWGANAYVTDEDSMTYEGNICRHLLPRVQCP |
| | ALIVHGEKDPLVPRFHADFTHKHVKGSRLHLMPEGKHNLHLRFADEFNKLAEDFLQ |
| | SEQ ID NO: 111 953 bp |
| NOV34b. | ATGGAACTGAAAATTCAGAATCCTGGGCCTCACTCCCAGAGGATCTGATCTACATGTG |
| CG131881-03 | |
| DNA | TGGAGATGCCCAGGAATCTGCTTTATTCTCTTTTGTCCTCCCACCTGTCCCCCCATTT |
| Sequence | |
| | CAGCACCTCGGTAACCTCTGCCAAAGTGGCTGTGAATGGCGTTCAGCTGCATTACCAG |
| | CAGACTGGAGAGGGAGATCACGCAGTCCTGCTACTTCCTGGGATGTTAGGAAGTGGAG |
| | AGACTGATTTTGGACCTCAGCTCAAGAACCTCAATAAGAAGCTCTTCACGGTGGTCGC |
| | CTGGGATCCTCGAGGCTATGGACATTCCAGGCCCCCAGATCGCGATTTCCCAGCAGAC |
| | TTTTTTGAAAGGGATGCAAAAGATGCTGTTGATTTGATGAAGGCGCTGAAGTTTAAGA |
| | AGGTTTCTCTGCTGGGGTGGAGTGATGGGGGCATAACCGCACTCATTGCTGCTGCAAA |
| | ATATCCATCTTACATCCACAAGATGGTGATCTGGGGCGCCAACGCCTACGTCACTGAC |
| | GAAGACAGCATGATATATGAGGGCATCCGAGATGTTTCCAAATGGAGTGAGAGAACAA |
| | GAAAGCCTCTAGAAGCCCTCTATGGGTAACATCTGCCGGCACCTGCTGCCCCGGGTCC |
| | AGTGCCCCGCCTTGATTGTGCACGGTGAGAAGGATCCTCTGGTCCCACGGTTTCATGC |
| | CGACTTCATTCATAAGCACGTGAAAGGCTCACGGTTTGGATGGCGTCAGAAGGAATGC |
| | CTGAAGAAGTGATATGCCATGTTGCTGCCCAGTTTCACACTGGAAGAGATCCTGTGCA |
| | AAGATCCAGCGGCCTGCTTTGGGTTCCAGTAAACACAAAAGCTGCATTTGATGCCAGA |
| | AGGCAAACACAACCTGCATTTGCGTTTTGCAGATGAATTCAACAAGTTAGCAGAAGAC |
| | TTCCTACAATGAGAATGCACACTCC |
| | ORF Start: ATG at 64 ORF Stop: TAA at 607 |
| | SEQ ID NO: 112 181 aa MW at 20115.7kD |
| NOV34b, | MPRNLLYSLLSSHLSPHFSTSVTSAKVAVNGVQLHYQQTGEGDHAVLLLPGMLGSGET |
| CG131881-03 | |
| Protein | DFGPQLKNLNKKLFTVVAWDPRGYGHSRPPDRDFPADFFERDAKDAVDLMKALKFKKV |
| Sequence | |
| | SLLGWSDGGITALTAAAKYPSYTHKMVIWGANAYVTDEDSMIYEGIRDVSKWSERTRK |
| | PLEALYG |
| | SEQ ID NO: 113 828 bp |
| NOV34c, | GGAACTGAAAATTCAGAATCCTGGGCCTCACTCCCAGAGGATCTGATCTACATGTGTG |
| CG131881-04 | |
| DNA | GAGATGCCCAGGAATCTGCTTTATTCTCTTTTGTCCTCCCACCTGTCCCCCCATTTCG |
| Sequence | |
| | GCACCTCGGTAACCTCTGCCAAAGTGGCTGTGAATGGCGTTCAGCTGCATTACCAGCA |
| | GACTGGAGAGGGAGATCACGCAGTCCTGCTACTTCCTGGGATGTTAGGAAGTGGAGAG |
| | ACTGATTTTGGACCTCAGCTCAAGAACCTCAATAAGAAGCTCTTCACAGTGGTCGCCT |
| | GGGATCCTCGAGGCTATGGACATTCCAGGCCCCCAGATCGCGATTTCCCAGCAGACTT |
| | TTTTGAkAGGGATGCAAAAGATGCTGTTGATTTGATGAAGGCGCTGAAGTTTAAGAAG |
| | GTTTCTCTGCTGGGGTGGAGTGATGGGGGCATAACCGCACTCATTGCTGCTGCAAAAT |
| | ATCCATCTTACATCCACAAGATGGTGATCTGGGGCGCCAACGCCTACGTCACTGACGA |
| | AGACAGCATGATATATGAGGGCATCCGAGATGTTTCCATGGAGTGAGAGAAAACAAGA |
| | AAGCCTCTAGAAGCCCTCTATGGGTAACATCTGCCGGCACCTGCTGCCCCGGGTCCAG |
| | TGCCCCGCCTTGATTGTGCACGGTGAGGAGGATCCTCTGGTCCCACGGTTTCATGCCG |
| | ACTTCATTCATAAGCACGTGAAAGGCTCACGGCTGCATTTGATGCCAGAAGGCAAACA |
| | CAACCTGCATTTGCGTTTTGCAGATGAATTCAACAAGTTAGCAGAAGACTTCCTACAA |
| | TGAGAATGCACACTCC |
| | ORF Start: ATG at 62 ORF Stop: TAA at 605 |
| | SEQ ID NO: 114 181 aa MW at 20085.7kD |
| NOV34c | MPRNLLYSLLSSHLSPHFGTSVTSAKVAVNGVQLHYQQTGEGDHAVLLLPGMLGSGET |
| CG131881-04 | |
| Protein | DFGPQLKNLNKKLFTVVAWDPRGYGHSRPPDRDPPADFFERDAKDAVDLMKALKFKKV |
| Sequence | |
| | SLLGWSDGGITALIAAAKYPSYIHKMVIWGANAYVTDEDSMIYEGTRDVSKWSERTRK |
| | PLEALYG |
| | SEQ ID NO: 115 1028 bp |
| NOV34d, | GGAACTGAAAATTCAGAATCCTGGGCCTCACTCCCAGAGGATCTGATCTACATGTGTG |
| CG131881-05 | |
| DNA | GAGATGCCCAGGAATCTGCTTTATTCTCTTTTGTCCTCCCACCTGTCCCCCCATTTCA |
| Sequence | |
| | GCACCTCGGTAACCTCTGCCAAAGTGGCTGTGAATGGCGTTCAGCTGCATTACCAGCA |
| | GACTGGAGAGGGAGATCACGCAGTCCTGCTACTTCCTGGGATGTTAGGAAGTGGAGAG |
| | ACTGATTTTGGACCTCAGCTCAAGAACCTCAATAAGAAGCTCTTCACGGTGGTCGCCT |
| | GGGATCCTCGAGGCTATGGACATTCCAGGCCCCCAGATCGCGATTTCCCAGCAGACTT |
| | TTTTGAAAGGGATGCAAAAGATGCTGTTGATTTGATGAAGGCGCTGAAGTTTAAGAAG |
| | GTTTCTCTGCTGGGGTGGAGTGATGGGGGCATAACCGCACTCATTGCTGCTGCAAAAT |
| | ATCCATCTTACATCCACAAGATGGTGATCTGGGGCGCCAACGCCTACGTCACTGACGA |
| | AGACAGCATGATATATGAGGGCATCCGAGATGTTTCCAAATGGAGTGAGAGAACAAGA |
| | AAGCCTCTAGAAGCCCTCTATGGGTAACATCTGCCGGCACCTGCTGCCCCGGGTCCAG |
| | TGCCCCGCCTTGATTGTGCACGGTGAGAAGGATCCTCTGGTCCCACGGTTTCATGTCG |
| | ACTTCATTCATAAGCACGTGAAAGGCTCACGGTGGGGCTTTCTAGAAGAAGCAGAATG |
| | AAAAAGGAAAATATTTAGTTTCTGAATAAAAAGGGGCTATTGGCAACCAGGTTTGGAT |
| | GGCGTCAGAAGGAATGCCTGAAGAAGTGATATGCCATGTTGCTGCCCAGTTTCACACT |
| | GGAAGAGATCCTGTGCAAAGATCCAGCGGCCTGCTTTGGGTTCCAGTAAACACAAAAG |
| | CTGCATTTGATGCCAGAAGGCAAACACAACCTGCATTTGCGTTTTGCAGATGAATTCA |
| | ACAAGTTAGCAGAAGACTTCCTACAATGAGAATGCACACTCC |
| | ORF Start: ATG at 62 ORF Stop: TAA at 605 |
| | SEQ ID NO: 116 181 aa MW at 20115.7kD |
| NOV34d, | MPRNLLYSLLSSHLSPHFSTSVTSAKVAVNGVQLHYQQTGEGDHAVLLLPGMLGSGET |
| CG131881-05 | |
| Protein | DFGPQLKNLNKKLFTVVAWDPRGYGHSRPPDRDFPADFFERDAKDAVDLMKALKFKKV |
| Sequence | |
| | SLLGWSDGGTTALIAAAKYPSYTHKMVTWGANAYVTDEDSMIYEGIRDVSKWSERTRK |
| | PLEALYG |

[0501] Sequence comparison of the above protein sequences yields the following sequence relationships shown in Table 34B.

TABLE 34B
Comparison of NOV34a against NOV34b through NOV34d

| | | Identities/ |
|---|---|---|
| Protein | NOV34a Residues/ | Similarities for |
| Sequence | Match Residues | the Matched Region |
| NOV34b | 1 . . . 161 | 144/161 (89%) |
| | 1 . . . 161 | 144/161 (89%) |
| NOV34c | 1 . . . 161 | 149/161 (92%) |
| | 1 . . . 161 | 149/161 (92%) |
| NOV34d | 1 . . . 161 | 144/161 (89%) |
| | 1 . . . 161 | 144/161 (89%) |

[0502] Further analysis of the NOV34a protein yielded the following properties shown in Table 34C.

TABLE 34C
Protein Sequence Properties NOV34a

| | |
|---|---|
| PSort | 0.7403 probability located in microbody (peroxisome); |
| analysis: | 0.2112 probability located in lysosome (lumen); 0.1000 |
| | probability located in mitochondrial matrix space; 0.0000 |
| | probability located in endoplasmic reticulum (membrane) |
| SignalP | No Known Signal Sequence Predicted |
| analysis: | |

[0503] A search of the NOV34a protein against the Geneseq database, a proprietary database that contains sequences published in patents and patent publication, yielded several homologous proteins shown in Table 34D.

TABLE 34D
Geneseq Results for NOV34a

| | | NOV34a | | |
|---|---|---|---|---|
| | Protein/Organism/ | Residues/ | Identities/ | |
| Geneseq | Length [Patent #, | Match | Similarities for | Expect |
| Identifier | Date] | Residues | the Matched Region | Value |
| ABG22318 | Novel human diagnostic protein #22309- | 1 . . . 230 | 222/279 (79%) | e−122 |
| | Homo sapiens, 284 aa. | 6 . . . 284 | 226/279 (80%) | |
| | [WO200175067-A2, 11 Oct. 2001] | | | |
| ABG22318 | Novel human diagnostic protein #22309- | 1 . . . 230 | 222/279 (79%) | e−122 |
| | Homo sapiens, 284 aa. | 6 . . . 284 | 226/279 (80%) | |
| | [WO200175067-A2, 11 Oct. 2001] | | | |
| ABB61473 | Drosophila melanogaster polypeptide | 23 . . . 228 | 97/252 (38%) | 2e−47 |
| | SEQ ID NO 11211-Drosophila | 22 . . . 273 | 141/252 (55%) | |
| | melanogaster, 278 aa. [WO200171042- | | | |
| | A2, 27 Sep. 2001] | | | |
| AAW00549 | Protein sequence of BA 70.1 fragment- | 160 . . . 219 | 58/60 (96%) | 5e−30 |
| | Homo sapiens, 99 aa. | 40 . . . 99 | 59/60 (97%) | |
| | [U.S. Pat. No. 5536647-A, 16 Jul. 1996] | | | |
| AAU34331 | Staphylococcus aureus cellular | 21 . . . 142 | 45/132 (34%) | 2e−09 |
| | proliferation protein #607- | 1 . . . 26 | 66/132 (49%) | |
| | Staphylococcus aureus, 241 aa. | | | |
| | [WO200170955-A2, 27 Sep. 2001] | | | |

[0504] In a BLAST search of public sequence datbases, the NOV34a protein was found to have homology to the proteins shown in the BLASTP data in Table 34E.

TABLE 34E
Public BLASTP Results for NOV34a

| | | NOV34a | Identities/ | |
|---|---|---|---|---|
| Protein | | Residues/ | Similarities for | |
| Accession | | Match | the Matched | Expect |
| Number | Protein/Organism/Length | Residues | Portion | Value |
| Q13855 | Biphenyl hydrolase-related protein- | 1 . . . 230 | 230/274 (83%) | e−129 |
| | Homo sapiens (Human), 274 aa. | 1 . . . 274 | 230/274 (83%) | |
| Q8R164 | Similar to RIKEN cDNA | 18 . . . 230 | 186/257 (72%) | e−104 |
| | 2010012D11 gene-Mus musculus | 35 . . . 291 | 201/257 (77%) | |
| | (Mouse), 291 aa. | | | |
| Q8R589 | Similar to RIKEN cDNA | 18 . . . 230 | 185/257 (71%) | e−103 |
| | 2010012D11 gene-Mus musculus | 35 . . . 291 | 200/257 (76%) | |
| | (Mouse), 291 aa. | | | |
| Q9DCC6 | 2010012D11Rik protein-Mus | 18 . . . 230 | 185/257 (71%) | e−103 |
| | musculus (Mouse), 291 aa. | 35 . . . 291 | 200/257 (76%) | |
| Q9CYD0 | 5730533B08Rik protein-Mus | 18 . . . 161 | 123/144 (85%) | 1e−69 |
| | musculus (Mouse), 245 aa. | 43 . . . 186 | 136/144 (94%) | |

[0505] PFam analysis predicts that the NOV34a protein contains the domains shown in the Table 34F.

TABLE 34F
Domain Analysis of NOV34a

| | | Identities/ | |
|---|---|---|---|
| Pfam | NOV34a | Similarities for | Expect |
| Domain | Match Region | the Matched Region | Value |
| DLH | 167 . . . 200 | 12/34 (35%) | 0.26 |
| | | 29/34 (85%) | |
| abhydrolase | 72 . . . 229 | 46/235 (20%) | 0.0097 |
| | | 120/235 (51%) | |

### Example 35

[0506] The NOV35 clone was analyzed, and the nucleotide and encoded polypeptide sequences are shown in Table 35A.

TABLE 35A
NOV35 Sequence Analysis

| | |
|---|---|
| | SEQ ID NO: 117 1218 bp |
| NOV35a, | GCGGCGGCTGCCCGGCGGCCCGGGCGCGCGGCGCTTCGCCATGTACACCTTCGTCGTA |
| CG133535-01 | |
| DNA | CGCGATGAGAACAGCAGCGTCTACGCCGAGGTCTCCCGGCTGCTCCTCGCCACCGGCC |
| Sequence | |
| | ACTGGAAGAGGCTGCGGCGAGACAACCCCAGATTCAACCTGATGCTGGGAGAGAGGAA |
| | TCGGCTGCCCTTCGGGAGACTGGGTCACGAGCCCGGGCTGGTACAGTTGGTGAATTAC |
| | TACAGGGGTGCTGACAAACTGTGTCGCAAAGCTTCTTTAGTGAAGCTAATCAAGACAA |
| | GCCCTGAACTGGCTGAGTCCTGCACATGGTTCCCTGAATCTTATGTGATTTATCCAAC |
| | CAATCTCAAGACTCCAGTTGCTCCAGCACAGAATGGAATTCAGCCACCAATCAGTAAC |
| | TCAAGGACAGATGAAAGAGAATTCTTTCTCGCCTCTTATAACAGAAAGAAAGAGGATG |
| | GAGAGGGCAACGTTTGGATTGCAAAGTCATCAGCCGGTGCCAAAGGTGAGGGCATTCT |
| | CATCTCCTCAGAGGCTTCAGAGCTTCTCGATTTCATAGACAACCAGGGCCAAGTGCAC |
| | GTGATCCAGAAATATCTTGAGCACCCTCTGCTGCTTGAGCCAGGTCATCGCAAGTTTG |
| | ACATTCGAAGCTGGGTCTTGGTGGATCATCAGTATAATATCTACCTCTATAGAGAGGG |
| | TGTGCTTCGGACTGCTTCAGAACCATATCATGTTGATAATTTCCAAGACAAAACCTGC |
| | CATTTGACCAATCACTGCATTCAAAAAGAGTATTCAAAGAACTACGGGAAGTATGAAG |
| | AAGGAAATGAAATGTTCTTCAAGGAGTTCAATCAGTACCTAACAAGTGCTTTGAACAT |
| | TACCCTAGAAAGTAGTATCTTACTACAAATCAAACATATAATCAGGAACTGCCTCCTG |
| | AGCGTGGAGCCTGCCATTAGCACCAAGCACCTCCCTTACCAGAGCTTCCAGCTCTTCG |
| | GCTTTGACTTCATGGTCGATGAGGAGCTGAAGGTGTGGCTCATTGAGGTCAACGGTGC |
| | CCCTGCATGTGCTCAGAAGCTCTATGCAGAACTGTGCCAAGGCATCGTGGACATAGCC |
| | ATTTCCAGTGTCTTCCCACCCCCAGATGTGGAGCAACCTCAGACCCAGCCAGCTGCCT |
| | TCATCAAGCTGTGACAGAGGGCACTCCCTGCTGCCTTGGAAAAAGCACGGGGTCCTGC |
| | ORF Start: ATG at 41 ORF Stop: TGA at 1172 |
| | SEQ ID NO: 118 377 aa MW at 43211.8kD |
| NOV35a, | MYTFVVRDENSSVYAEVSRLLLATGHWKRLRRDNPRFNLMLGERNRLPFGRLGHEPGL |
| CG133535-01 | |
| Protein | VQLVNYYRGADKLCRKASLVKLIKTSPELAESCTWFPESYVIYPTNLKTPVARAQNGI |
| Sequence | |
| | QPPISNSRTDEREFFLASYNRKKEDGEGNVWIAKSSAGAKGFGILISSEASELLDFID |
| | NQGQVHVIQKYLEHPLLLFRGHRKFDIRSWVLVDHQYNIYLYREGVLRTASEPYHVDN |
| | FQDKTCHLTNHCTQKEYSKNYGKYEEGNEMFFKEFNQYLTSALNITLFSSILLQIKHI |
| | IRNCLLSVEPATSTKHLPYQSFQLFGFDFMVDEELKVWLIEVNGAPACAQKLYAELCQ |
| | GIVDIAISSVFPPPDVEQPQTQRAAFIKL |

[0507] Further analysis of the NOV35a protein yielded the following properties shown in Table 35B.

TABLE 35B
Protein Sequence Properties NOV35a

| | |
|---|---|
| PSort | 0.4641 probability located in mitochondrial matrix space; |
| analysis: | 0.3581 probability located in microbody (peroxisome); 0.1627 |
| | probability located in mitochondrial inner membrane; 0.1627 |
| | probability located in mitochondrial intermembrane space |
| SignalP | No Known Signal Sequence Predicted |
| analysis: | |

[0508] A search of the NOV35a protein against the Geneseq database, a proprietary database that contains sequences published in patents and patent publication, yielded several homologous proteins shown in Table 35C.

TABLE 35B
Geneseq Results for NOV35a

| | Protein/Organism/ | NOV35a | Identities/ | |
|---|---|---|---|---|
| Geneseq | Length [Patent #, | Residues/ | Similarities for | Expect |
| Identifier | Date] | Residues | the Matched Region | Value |
| AAM79068 | Human protein SEQ ID NO 1730- | 5 . . . 377 | 373/373 (100%) | 0.0 |
| | Homo sapiens, 377 aa. | 5 . . . 377 | 373/373 (100%) | |
| | [WO200157190-A2, 9 Aug. 2001] | | | |
| AAM80052 | Human protein SEQ ID NO 3698- | 5 . . . 156 | 152/152 (100%) | 2e−85 |
| | Homo sapiens, 190 aa. | 9 . . . 160 | 152/152 (100%) | |
| | [WO200157190-A2, 9 Aug. 2001] | | | |
| ABG12642 | Novel human diagnostic protein | 106 . . . 251 | 136/146 (93%) | 8e−77 |
| | #12633-Homo sapiens, 146 aa. | 1 . . . 146 | 140/146 (95%) | |
| | [WO200175067-A2, 11 Oct. 2001] | | | |
| ABG12642 | Novel human diagnostic protein | 106 . . . 251 | 136/146 (93%) | 8e−77 |
| | #12633-Homo sapiens, 146 aa. | 1 . . . 146 | 140/146 (95%) | |
| | [WO200175067-A2, 11 Oct. 2001] | | | |
| ABG09620 | Novel human diagnostic protein | 218 . . . 347 | 117/130 (90%) | 2e−63 |
| | #9611-Homo sapiens, 185 aa. | 1. . . 130 | 117/130 (90%) | |
| | [WO200175067-A2, 11 Oct. 2001] | | | |

[0509] In a BLAST search of public sequence datbases, the NOV35a protein was found to have homology to the proteins shown in the BLASTP data in Table 35D.

TABLE 35D
Public BLASTP Results for NOV35a

| | | NOV35a | | |
|---|---|---|---|---|
| Protein | | Residues/ | Identities/ | |
| Accession | | Match | Similarities for | Expect |
| Number | Protein/Organism/Length | Residues | the Matched Portion | Value |
| Q8VEG2 | Hypothetical 43.1 kDa protein-Mus | 1 . . . 377 | 359/377 (95%) | 0.0 |
| | musculus (Mouse), 377 aa. | 1 . . . 377 | 369/377 (97%) | |
| P38160 | Tubulin-tyrosine ligase (EC | 1 . . . 377 | 360/379 (94%) | 0.0 |
| | 6.3.2.25) (TTL)-Sus scrofa (Pig), | 1 . . . 379 | 369/379 (96%) | |
| | 379 aa. | | | |
| QSR11.7 | Hypothetical 43.1 kDa protein-Mus | 1 . . . 377 | 358/377 (94%) | 0.0 |
| | musculus (Mouse), 377 aa. | 1 . . . 377 | 368/377 (96%) | |
| Q9QXJ0 | Tubulin-tyrosine ligase (EC | 1 . . . 377 | 357/377 (94%) | 0.0 |
| | 6.3.2.25) (TTL)-Rattus norvegicus | 1 . . . 377 | 368/377 (96%) | |
| | (Rat), 377 aa. | | | |
| P38584 | Tubulin-tyrosine ligase (EC | 1 . . . 377 | 354/377 (93%) | 0.0 |
| | 6.3.2.25) (TTL)-Bos taurus | 1 . . . 377 | 368/377 (96%) | |
| | (Bovine), 377 aa. | | | |

[0510] PFam analysis predicts that the NOV35a protein contains the domains shown in the Table 35E.

TABLE 35E
Domain Analysis of NOV35a

| Pfam | NOV35a | for the | Expect |
|---|---|---|---|
| Domain | Match Region | Matched Region | Value |
| TTL | 81 . . . 367 | 108/334 (32%) | 2.1e−108 |
| | | 254/334 (76%) | |

### Example 36

[0511] The NOV36 clone was analyzed, and the nucleotide and encoded polypeptide sequences are shown in Table 36A.

TABLE 36A
NOV36 Sequence Analysis

| | |
|---|---|
| | SEQ ID NO: 119 4562 bp |
| NOV36a, | AGAGGAGACTTGATCTCTAGTTCATTCTGGAACTCCGCCTGGGATTGTGCACTGTCCA |
| CG133558-01 | |
| DNA | GGGTCCTGAAACATGAACCAAACTGCCAGCGTGTCCCATCACATCAAGTGTCAACCCT |
| Sequence | |
| | CAAAAACAATCAAGGAACTGGGAAGTAACAGCCCTCCACAGAGAAACTGGAAGGGAAT |
| | TGCTATTGCTCTGCTGGTGATTTTAGTTGTATGCTCACTCATCACTATGTCAGTCATC |
| | CTCTTAACCCCAGGTTTAGATGAACTCACAAATTCGTCAGAAACCAGATTGTCTTTGG |
| | AAGACCTCTTTAGGAAAGACTTTGTGCTTCACGATCCAGAGGCTCGGTGGATCAATGG |
| | TAAGGATGTGGTGTATAAAAGCGAGAATGGACATGTCATTAAACTGAATATAGAAACA |
| | AATGCTACCACATTATTATTGGAAAACACAACTTTTGTAACCTTCAAAGCATCAAGAC |
| | ATTCAGTTTCACCAGATTTAAAATATGTCCTTCTGGCATATGATGTCAAACAGATTTT |
| | TCATTATTCGTATACTGCTTCATATGTGATTTACAACATACACACTAGGGAAGTTTGG |
| | GAGTTAAATCCTCCAGAAGTAGAGGACTCCGTCTTGCAGTACGCGGCCTGGGGTGTCC |
| | AAGGGCAGCAGCTGATTTATATTTTTGAAAATAATATCTACTATCAACCTGATATAAA |
| | GAGCAGTTCATTGCGACTGACATCTTCTGGAAAAGAAGAAATAATTTTTAATGGGATT |
| | GCTGACTGGTTATATGAAGAGGAACTCCTGCATTCTCACATCGCCCACTGGTGGTCAC |
| | CAGATGGAGAAAGACTTGCCTTCCTGATGATAAATGACTCTTTGGTACCCACCATGGT |
| | TATCCCTCGGTTTACTGGAGCGTTGTATCCCAAAGGAAAGCAGTATCCGTATCCTAAG |
| | GCAGGTCAAGTGAACCCAACAATAAAATTATATGTTGTAAACCTGTATGGACCAACTC |
| | ACACTTTGGAGCTCATGCCACCTGACAGCTTTAAAATCAAGAGATACTATATCACTAT |
| | GGTTAAATGGGTAAGCAATACCAAGACTGTGGTAAGATGGTTAAACCGACCTCAGAAC |
| | ATCTCCATCCTCACAGTCTGTGAGACCACTACAGGTGCTTGTAGTAAAAAATATGAGA |
| | TGACATCAGATACGTGGCTCTCTCAGCAGAATGAGGAGCCCGTGTTTTCTAGAGACGG |
| | CAGCAAATTCTTTATGACAGTGCCTGTTAAGCAAGGGGGACGTGGAGAATTTCACCAC |
| | ATAGCTATGTTCCTCATCCAGAGTAAAAGTGAGCAAATTACCGTGCGGCATCTGACAT |
| | CAGGAAACTGGGAAGTGATAAAGATCTTGGCATACGATGAAACTACTCAAAAAATTTA |
| | CTTTCTGAGCACTGAATCTTCTCCCAGAGGAAGGCAGCTGTACAGTGCTTCTACTGAA |
| | GGATTATTGAATCGCCAATGCATTTCATGTAATTTCATGAAAGAACAATGTACATATT |
| | TTGATGCCAGTTTTAGTCCCATGAATCAACATTTCTTATTATTCTGTGAAGGTCCAAG |
| | GGTCCCAGTGGTCAGCCTACATAGTACGGACAACCCAGCAAAATATTTTATATTGGAA |
| | AGCAATTCTATGCTGAAGGAAGCTATCCTGAAGAAGAAGATAGGAAAGCCAGAAATTA |
| | AAATCCTTCATATTGACGACTATGAACTTCCTTTACAGTTGTCCCTTCCCAAAGATTT |
| | TATGGACCGAAACCAGTATGCTCTTCTGTTAATAATGGATGAAGAACCAGGAGGCCAG |
| | CTGGTTACAGATAAGTTCCATATTGACTGGGATTCCGTACTCATTGACATGGATAATG |
| | TCATTGTAGCAAGATTTGATGGCAGAGGAAGTGGATTCCAGGGTCTGAAAATTTTGCA |
| | GGAGATTCATCCAAGATTAGGTTCAGTAGAAGTAAAGGACCAAATAACAGCTGTGAAA |
| | TTTTTGCTGAAACTGCCTTACATTGACTCCAAAAGATTAAGCATTTTTGGAAAGGGTT |
| | ATGGTGGCTATATTGCATCAATGATCTTAAAATCAGATGAAAAGCTTTTTAAATGTGG |
| | ATCCGTGGTTGCACCTATCACAGACTTGAAATTGTATGCCTCAGCTTTCTCTGAAAGA |
| | TACCTTGGGATGCCATCTAAGGAAGAAAGCACTTACCAGGCAGCCAGTGTGCTACATA |
| | ATGTTCATGGCTTGAAAGAAGAAAATATATTAATAATTCATGGAACTGCTGACACAAA |
| | AGTTCATTTCCAACACTCAGCAGAATTAATCAAGCACCTAATAAAGCTGGAAGTGAAT |
| | TATACTATGCAGGTCTACCCAGATGAAGGTCATAACGTATCTGAGAAGAGCAAGTATC |
| | ATCTCTACAGCACAATCCTCAAATTCTTCAGTGATTGTTTGAAGGAAGAAATATCTGT |
| | GCTACCACAGGAACCAGAAGAGATGAATAATGGACCGTATTTATACAGAACTGAAAGG |
| | GAATATTGAGGCTCAATGAAACCTGACAAAGAGACTGTAATATTGTAGTTGCTCCAGA |
| | ATGTCAAGGGCAGCTTACCGAGATGTCACTGGAGCAGCACGCTCAGAGACAGTGAACT |
| | AGCATTTGAATACACAAGTCCAAGTCTACTGTGTTGCTAGGGGTGCAGAACCCGTTTC |
| | TTTGTATGAGAGAGGTCAAGGGTTGGTTTCCTGGGAGAAAAATTAGTTTTGCATTAAG |
| | TAGGAGTAGTGCATGTTTTCTTCTGTTATCCCCCTGTTTGTTCTGTAACTAGTTGCTC |
| | TCATTTTAATTTCACTGGCCACCATCATCTTTGCATATAATGCACAATCTATCATCTG |
| | TCCTACAGTCCCTGATCTTTCATGGCTGAGCTGCAATCTAACACTTTACTGTACCTTT |
| | ATAATAAGTGCAATTCTTTCATTGTCTATTATTGTGCTTAAGAAAATATTCAGTTAAT |
| | AAAAAACAGAGTATTTTATGTAATTTCTGTTTTTAAAAAGACATTATTAAATGGGTCA |
| | AGGACATATAGAAAGTGTGGATTTCAGCACCTTCCAAAGTTCAGCCAGTTATCAGTAG |
| | ATACAATATCTTTAATGAACACACGAGTGTATGTCTCACAATATATATACACAAAGTG |
| | TGCATATACAGTTAATGAAACTATCTTTAAATGTTATTCATGCTATAAAGAGTAAACG |
| | TTTGATGAATTAGAAGAGATGCTCTTTTCCAAGCTATAATGGATGCTTTGTTTAATGA |
| | GCCAAATATGATGAAACATTTTTTCCAATTCAAATTCTAGCTATTGCTTTCCTATAAA |
| | TGTTTGGGTTGTGTTTGGTATTGTTTTTAGTGGTTAATAGTTTTCCAGTTGCATTTAA |
| | TTTTTTGAATATGATACCTTGTCACATGTAAATTAGATACTTAAATATTAAATTATAG |
| | TTTCTGATAAAGAAATTTTGTTAACAATGCAATGCCACTGAGTGCTATTTTGCTCTTT |
| | TGGTGGAGAAGGCTTTTTTCAAAACTCTTGGTCCTTTTACTTCTTTCTCTCAGTGCAG |
| | AATCAATTCTCATTTTCATCGTAAAAGCAAATAGCTGGATTATTTCATTTGCCAGTTT |
| | CTATTTAGTATTCCATGCCTGCCCAATTCATCTGTTACTGTTTAATTTCAATTCTTCT |
| | GGTGAGAATTAGAAATGAAATATTTTTTATTCATTGGCCAAAAAGTTCACAGACAGCA |
| | GTGTTTGCTATTTACTTTGAATTGAAGGCACAAAATGCATCAATTCCTGTGCTGTGTT |
| | GACTTGCAGTAGTAAGTAACTGAGAGCATAAAATAAACCTGACTGTATGAAGTCAATT |
| | TAAGTGATGAGAACATTTAACTTTGGTGACTAAAGTCAGAATATCTTCTCACTTCACT |
| | TAAGGGATCTTCCAGAAGATATCTAAAAGTCTGTAATAAGCTTAGAAGTTCAGATAAA |
| | TCTAGGCAGGATACTGCATTTTTGTGGTTTTAAAAAAGTCCTTAGGACAGACTGAATT |
| | ATCATAACTTATGGCATCAGGAGGAAACTTTAAAATATCAAGGAATCACTCAGTCACC |
| | CTCCTGTTTTGTTGAAGGATCAACCCCAAATTCTGGGTATTTGAGTACATGTGAATCA |
| | TGGATTTGGTATTCAACTTTTTCCCTGGATGCTTTGGAATCGTGTCTTCCATGCTCCA |
| | TTGGGTTCAATTTAAAATAGGAGAGGCTTTCTCTTCTGAAAGATCCATTTTAGGTCTT |
| | TTTCAAGAATAGTGAACACATTTTTTAACAAAATAAGTTGTAATTTTAAAAGGAAAGT |
| | TTTGCCTATTTTATTAAGATGGAAATTTCTTTTTAGGCTAATTTGAAATCCAACTGAA |
| | GCTTTTTAACCAATATTTTAAATTTGAACCACTAGAGTTTTTTATGATGCAAATGATT |
| | ATGTTGTCTGAAAGGTGTGGTTTTATTGAATGTCTATTTGAGTATCATTTAAAAAGTA |
| | TTTGCCTTTTACTGTCATCATTTCTCTTGTTTTATTATTATTATCAATGTTTATCTAT |
| | TTTTCAATTAATTTAATACAGTTTCTAATGTGAAAGAC |
| | ORF Start: ATG at 71 ORF Stop: TAA at 2465 |
| | SEQ ID NO: 120 1798 aa MW at 91066.5kD |
| NOV36a, | MNQTASVSHHTKCQPSKTTKELGSNSPPQRNWKGIAIALLVTLVVCSLTTMSVTLLTP |
| CG133558-01 | |
| Protein | GLDELTNSSETRLSLEDLPRKDPVLHDPEARWINGKDVVYKSENGHVIKLNTETNATT |
| Sequence | |
| | LLLENTTFVTFKASRHSVSRDLKYVLLAYDVKQIFHYSYTASYVIYNTHTREVWELNP |
| | PEVEDSVLQYAAWGVQGQQLIYIFENNIYYQPDTKSSSLRLTSSGKEEIIFNGIADWL |
| | YEEELLHSHIAHWWSPDGERLAFLMINDSLVPTMVIPRFTGALYPKGKQYPYPKAGQV |
| | NPTTKLYVVNLYGPTHTLELMPPDSFKSREYYITMVKWVSNTKTVVRWLNRPQNTSIL |
| | TVCETTTGACSKKYEMTSDTWLSQQNEEPVFSRDGSKFFMTVPVKQGGRGEFHHIAMF |
| | LIQSKSFQITVRHLTSGNWEVTKILAYDETTQKTYFLSTESSPRGRQLYSASTEGLLN |
| | RQCISCNFMKEQCTYFDASFSPMNQHFLLPCEGPRVPVVSLHSTDNPAKYFILESNSM |
| | LKEAILKKKIGKPEIKTLHIDDYELPLQLSLPKDFMDRNQYALLLIMDEEPGGQLVTD |
| | KFHIDWDSVLIDMDNVIVARFDGRGSGFQGLKILQEIHRRLGSVEVKDQITAVKFLLK |
| | LPYTDSKRLSIFGKGYGGYIASMILKSDEKLFKCGSVVAPITDLKLYASAFSERYLGM |
| | PSKEESTYQAASVLHNVHGLKEENILIIHGTADTKVHFQHSAELTKHLIKAGVNYTMQ |
| | VYPDEGHNVSEKSKYHLYSTTLKFFSDCLKEEISVLPQEPEEDE |

[0512] Further analysis of the NOV36a protein yielded the following properties shown in Table 36B.

TABLE 36B
Protein Sequence Properties NOV36a

| | |
|---|---|
| PSort | 0.7900 probability located in plasma membrane; 0.3000 |
| analysis: | probability located in Golgi body; 0.2426 probability |
| | located in microbody (peroxisome); 0.2000 probability |
| | located in endoplasmic reticulum (membrane) |
| SignalP | Cleavage site between residues 53 and 54 |
| analysis: | |

[0513] A search of the NOV36a protein against the Geneseq database, a proprietary database that contains sequences published in patents and patent publication, yielded several homologous proteins shown in Table 36C.

TABLE 36C
Geneseq Results for NOV36a

| | | NOV36a | | |
|---|---|---|---|---|
| | Protein/Organism/ | Residues/ | Identities/ | |
| Geneseq | Length [Patent #, | Match | Similarities for | Expect |
| Identifier | Date] | Residues | the Matched Region | Value |
| ABB04588 | Human aminopeptidase 21956-Homo | 1 . . . 798 | 794/798 (99%) | 0.0 |
| | sapiens, 796 aa. [WO200192493-A2 | 1 . . . 796 | 794/798 (99%) | |
| | 6 Dec. 2001] | | | |
| AAB11748 | Rat dipeptidyl peptidase IV (DPPIV)- | 32 . . . 782 | 271/773 (35%) | e−138 |
| | Rattus sp. 767 aa. [JP2000143699-A, | 5 . . . 763 | 442/773 (57%) | |
| | 6 May 2000] | | | |
| ABB08991 | Human dipeptidyl peptidase IV-Homo | 32 . . . 782 | 267/773 (34%) | e−136 |
| | sapiens, 766 aa. | 5 . . . 762 | 439/773 (56%) | |
| | [U.S. Pat. No. 6337069-B1, | | | |
| | 8 Jan. 2002] | | | |
| AAG78417 | Human dipeptidyl peptidase IV amino | 32 . . . 782 | 267/773 (34%) | e−136 |
| | acid sequence-Homo sapiens, 766 aa. | 5 . . . 762 | 439/773 (56%) | |
| | [WO200179473-A2, 25 Oct. 2001] | | | |
| AAR40909 | Sequence encoded by human CD26 | 32 . . . 782 | 267/773 (34%) | e−136 |
| | cDNA-Homo sapiens, 766 aa. | 5 . . . 762 | 439/773 (56%) | |
| | [WO9316102-A, 19 Aug. 1993] | | | |

[0514] In a BLAST search of public sequence datbases, the NOV36a protein was found to have homology to the proteins shown in the BLASTP data in Table 36D.

TABLE 36D
Public BLASTP Results for NOV36a

| | | NOV36a | | |
|---|---|---|---|---|
| Protein | | Residues/ | Identities/ | |
| Accession | | Match | Similarities for | Expect |
| Number | Protein/Organism/Length | Residues | the Matched Portion | Value |
| CAD20410 | Sequence 1 from Patent WO0192493- | 1 . . . 798 | 794/798 (99%) | 0.0 |
| | Homo sapiens (Human), 796 aa. | 1 . . . 796 | 794/798 (99%) | |
| Q9P236 | KIAA1492 protein-Homo sapiens | 88 . . . 798 | 709/711 (99%) | 0.0 |
| | (Human), 711 aa (fragment). | 1 . . . 711 | 709/711 (99%) | |
| Q9Z218 | Dipeptidyl peptidase IV like protein | 1 . . . 797 | 414/806 (51%) | 0.0 |
| | (Dipeptidyl aminopeptidase-related | 1 . . . 804 | 567/806 (69%) | |
| | protein) (Dipeptidylpeptidase VI) (DPPX) | | | |
| | (Dipeptidylpeptidase 6) (Dipeptidyl | | | |
| | peptidase-like protein 6)-Mus musculus | | | |
| | (Mouse), 804 aa. | | | |
| I68600 | dipeptidyl aminopeptidase like protein- | 20 . . . 798 | 411/784 (52%) | 0.0 |
| | human, 803 aa. | 19 . . . 800 | 555/784 (70%) | |
| P42658 | Dipeptidyl peptidase IV like protein | 21 . . . 798 | 411/783 (52%) | 0.0 |
| | (Dipeptidyl aminopeptidase-related | 82 . . . 862 | 554/783 (70%) | |
| | protein) (Dipeptidylpeptidase VI) (DPPX)- | | | |
| | Homo sapiens (Human), 865 aa. | | | |

[0515] PFam analysis predicts that the NOV36a protein contains the domains shown in the Table 36E.

TABLE 36E
Domain Analysis of NOV36a

| | | Identities/ | |
|---|---|---|---|
| Pfam | NOV36a | Similarities for | Expect |
| Domain | Match Region | the Matched Region | Value |
| DPPIV_N_term | 71 . . . 580 | 199/571 (35%) | 7.1e−73 |
| | | 405/571 (71%) | |
| Peptidase_S9 | 582 . . . 658 | 27/81 (33%) | 6.6e−21 |
| | | 52/81 (64%) | |
| DLH | 721 . . . 761 | 16/41 (39%) | 0.14 |
| | | 33/41 (80%) | |

### Example 37

[0516] The NOV37 clone was analyzed, and the nucleotide and encoded polypeptide sequences are shown in Table 37A.

TABLE 37A
NOV37 Sequence Analysis

| | |
|---|---|
| | SEQ ID NO: 121 2057 bp |
| NOV37a, | ATTATATTCCAAATCAGCATGGGCATTAACCATGACAATGACCACCCATCGTGTGCTG |
| CC133589-01 | |
| DNA | ATCGTCTTCATATCATGTCTGGTGAATGGATTAAAGGACAGAATCTTGGTGACGTTTC |
| Sequence | |
| | ATGGTCTCGATGTAGCAAGGAAGATTTGGAAAGATTTCTCAGGTCAAAGGCCAGTAAC |
| | TGCTTGCTACAAACAAATCCGCAGAGTGTCAATTCTGTGATGGTTCCCTCCAAGCTGC |
| | CAGGGATGACATACACTGCTGATGAACAATGCCAGATCCTTTTTGGGCCATTGGCTTC |
| | TTTTTGTCAGGAGATGCAGCATGTTATTTGCACAGGATTATGGTGCAAGGTAGAAGGT |
| | GAGAAAGAATGCAGAACCAAGCTAGACCCACCAATGGATGGAACTGACTGTGACCTTG |
| | GTAAGATTCTGAAGCAAGGGATTGTAATGGTCCCAGAAAACAATACAGAATATGTGAG |
| | AATCCACCTTGTCCTGCAGGTTTGCCTGGATTCAGAGACTGGCAATGTCAGGCTTATA |
| | GTGTTAGAACTTCCTCCCCAAAGCATATACTTCAGTGGCAAGCTGTCCTGGATGAAGT |
| | TGACTCTTAAATACATTAAGGTGGCTGCCCACCCCCATGGTTCTTGGAACACTCGTGT |
| | GCCCTGCTTGGTTGCTGTGTTGTTAACACCTACCCGGCTTTCCTACTACATCTCTGAA |
| | AAACCATGTGCCTTGTTTTGCTCTCCTGTTGGAAAAGAACAGCCTATTCTTCTATCAG |
| | AAAAAGTGATGGATGGAACTTCTTGTGGCTATCAGGGATTAGATATCTGTGCAAATGG |
| | CAGGTGCCAGAAAGTTGGCTGTGATGGTTTATTAGGGTCTCTTGCAAGAGAAGATCAT |
| | TGTGGTGTATGCAATGGCAATGGAAAATCATGCAAGATCATTAAAGGGGATTTTAATC |
| | ACACCAGAGGAGCAGGTTATGTAGAAGTGCTGGTGATACCTGCTGGAGCAAGAAGAAT |
| | CAAAGTTGTGGAGGAAAAGCCGGCACATAGCTATTTAGCTCTCCGAGATGCTGGCAAA |
| | CAGTCTATTAATAGTGACTGGAAGATTGAACACTCTGGAGCCTTCAATTTGGCTGGAA |
| | CTACCGTTCATTATGTAAGACGAGGCCTCTGGGAGAAGATCTCTGCCAAAGGTCCTAC |
| | TACAGCACCTTTACATCTTCTGGTGCTCCTGTTTCAGGATCAGAATTATGGTCTTCAC |
| | TATGAATACACTATCCCATCAGACCCTCTTCCAGAAAACCAGAGCTCTAAAGCACCTG |
| | AGCCCCTCTTCATGTGGACACACACAAGCTGGGAAGATTGCGATGCCACTTGTGGAGG |
| | AGGAGAAAGGAAGACAACAGTGTCCTGCACAAAAATCATGAGCAAAAATATCAGCATT |
| | GTGGACAATGAGAAATGCAAATACTTAACCAAGCCAGAGCCACAGATTCGAAAGTGCA |
| | ATGAGCAACCATGTCAAACAAGGGAATATCTAATAAGTCGTGTGAGTGCTACAAGCCA |
| | GGCAATAGAGAGCAAAGAAAAGGCCAGTCCCCATTGGTTGAATGGAGAAGCCCTTCTA |
| | GGAGGAATGGGCGTGGGGCTGGCTGTCAAGGATCCAGGCACAGGATTCTACAAATATC |
| | ATGAGGTGAAAATAGAAAGTGTTTGGTGGATGATGACAGAATGGACCCCTTGTTCACG |
| | AACTTGTGGAAAAGGAATGCAGAGCAGACAAGTGGCCTGTACCCAACAACTGAGCAAT |
| | GGAACACTGATTAGAGCCCGAGAGAGGGACTGCATTGGGCCCAAGCCCGCCTCTGCCC |
| | AGCGCTGTGAGGGCCAGGACTGCATGACCGTGTGGGAGGCGGGAGTGTGGTCTGAGTG |
| | TTCAGTCAAGTGTGGCAAAGGCATACGTCATCGGACCGTTAGATGTACCAACCCAAGA |
| | AAGAAGTGTGTCCTCTCTACCAGACCCAGGGAGGCTGAAGACTGTGAGGATTATTCAA |
| | AATGCTATGTGTGGCGAATGGGTGACTGGTCTAAGGTGAGAACCATTCTGTATATTCT |
| | CAGTAATAGGTTTCAATAATGTCAGCA |
| | ORF Start: ATG at 19 ORF Stop: TAA at 2047 |
| | SEQ ID NO: 122 676 aa MW at 75430.0kD |
| NOV37a. | MGINHDNDHPSCADGLHIMSGEWIKGQNLGDVSWSRCSKEDLERFLRSKASNCLLQTN |
| CG133389-01 | |
| Protein | PQSVNSVMVPSKLPGMTYTADEQCQILFGPLASFCQEMQHVICTGLWCKVEGEKECRT |
| Sequence | |
| | KLDPPMDGTDCDLGKILKQGIVMVPENNTEYVRTHLVLQVCLDSETGNVPLIVLELPP |
| | QSTYFSGKLSWMKLTLKYTKVAAHRHGSWNTRVRCLVAVLLTPTRLSYYTSEKPCALF |
| | CSPVGKEQPILLSEKVMDGTSCGYQGLDICANGRCQKVGCDGLLGSLAREDHCGVCNG |
| | NGKSCKIIKGDFNHTRGAGYVEVLVIPAGARRIKVVEEKPAHSYLALRDAGKQSINSD |
| | WKIEHSGAPNLAGTTVHYVRRGLWEKISAKGPTTAPLHLLVLLFQDQNYGLHYEYTIP |
| | SDPLPENQSSKAPEPLFMWTHTSWEDCDATCGGGERKTTVSCTKIMSKNTSTVDNEKC |
| | KYLTKPEPQTRKCNEQPCQTREYLISRVSATSQAIESKEKASPHWLNGEALLGGMGVG |
| | LAVKDPGTGFYKYHEVKIESVWWMMTEWTPCSRTCGKGMQSRQVACTQQLSNGTLIRA |
| | RERDCIGPKPASAQRCEGQDCMTVWEAGVWSECSVKCGKGIRHRTVRCTNPRKKCVLS |
| | TRPREAEDCEDYSKCYVWRMGDWSKVRTILYTLSNRFQ |
| | SEQ ID NO 123 3977 bp |
| NOV37b, | GGGAAGAACCGCGAGATGCGCCTGACTCACATCTGCTGCTGCTGCCTCCTTTACCAGC |
| CG133589-02 | |
| DNA | TGGGGTTCCTGTCGAATGGGATCGTTTCAGAGCTGCAGTTCGCCCCCGACCGCGAGGA |
| Sequence | |
| | GTGGGAAGTCGTGTTTCCTGCGCTCTGGCGCCGGGAGCCGGTGGACCCGGCTGGCGGC |
| | AGCGGGGGCAGCGCGGACCCGGGCTGGGTGCGCGGCGTTGGGGGCGGCGGAAGCGCCC |
| | GGGCGCAGGCTGCCGGCAGCTCACGCGAGGTGCGCTCTGTGGCTCCGGTGCCTTTGGA |
| | GGAGCCCGTGGAGGGCCGATCAGAGTCCCGGCTCCGGCCCCCGCCGCCGTCGGAGGGT |
| | GAGGAGGACGAGGAGCTCGAGTCGCAGGAGCTGCCGCGGGGATCCAGCGGGGCTGCCG |
| | CCTTGTCCCCGGGCGCCCCGGCCTCGTGGCAGCCGCCGCCTCCCCCGCAGCCGCCCCC |
| | GTCCCCGCCCCCGGCCCAGCATGCCGAGCCGGATGGCGACGAAGTGTTGCTGCGGATC |
| | CCGGCCTTCTCTCGGGACCTGTACCTGCTGCTCCGGAGAGACGGCCGCTTCCTGGCGC |
| | CGCGCTTCGCAGTGGAACAGCGGCCAAATCCCGGCCCCGGCCCCACGGGGGCAGCATC |
| | CGCCCCGCAACCTCCCGCGCCACCAGACGCAGGCTGCTTCTACACCGGAGCTGTGCTG |
| | CGGCACCCTGGCTCGCTGGCTTCTTTCAGCACCTGTGGAGGTGGCCTGATGGGATTTA |
| | TACAGCTCAATGAGGACTTCATATTTATTGAGCCACTCAATGATACAATGGCCATAAC |
| | AGGTCACCCACACCGTGTATATAGGCAGAAAAGGTCCATGGACGAAAAGGTCACAGAG |
| | AAGTCAGCTCTTCACAGTCATTACTGTGGTATCATTTCAGATAAAGGAAGACCTAGGT |
| | CTAGAAAAATAGCAGAAAGTGGAAGAGGGAAACGATATTCATACAAATTACCTCAAGA |
| | ATACAACATAGAGACTGTAGTGGTTGCAGACCCAGCAATGGTTTCCTATCATGGAGCA |
| | GATGCAGCCAGGAGATTCATTCTAACCATCTTAAATATGGTATTTAACCTTTTCCAAC |
| | ACAAGAGTCTGGGTGTGCAGGTCAATCTTCGTGTGATAAAGCTTATTCTGCTCCATGA |
| | AACTCCACCAGAACTATATATTGGGCATCATGGAGAAAAAATGCTAGAGAGTTTTTGT |
| | AAGTGGCAACATGAAGAATTTGGCAAAAAGAATGATATACATTTAGAGATGTCAACAA |
| | ACTGGGGGGAAGACATGACTTCAGTGGATGCAGCTATACTTATAACAAGGAAAGATTT |
| | CTGTGTGCACAAAGATGAACCATGTGATACTGTTGGTATAGCTTACTTGAGTGGAATG |
| | TGTAGTGAAAAGAGAAAATGTATTATTGCTGAAGACAATGGCTTGAATCTTGCTTTTA |
| | CAATTGCTCATGAATGGGTCACAACATGGGCATTAACCATGACAAATGACCACCCATC |
| | GTGTGCTGATGGTCTTCATATCATGTCTGGTGAATGGATTAAAGGACAGAATCTTGGT |
| | GACGTTTCATGGTCTCGATGTAGCAAAGGAAGATTTGGAAGATTTCTCAGGTCAAAGG |
| | CCAGTAACTGCTTGCTACAAACAAATCCGCAGAGTGTCAATTCTGTGATGGTTCCCTC |
| | CAAGCTGCCAGGGATGACATACACTGCTGATGAACAATGCCAGATCCTTTTTGGGCCA |
| | TTGGCTTCTTTTTGTCAGGAGATGCAGCATGTTATTTGCACAGGATTATGGTGCAAGG |
| | TAGAAGGTGAGAAAGAATGCAGAACCAAGCTAGACCCACCAATGGATGGAACTGACTG |
| | TGACCTTGGTAAGTGGTGTAAGGCTGGAGAATGTACCAGCAGGACCTCAGCACCTGAA |
| | CATCTGGCCGGAGAGTGGAGCCTGTGGAGTCCTTGTAGCCGAACCTGCAGTGCTGGGA |
| | TCAGCAGTCGAGAGCGCAAATGTCCTGGGCTAGATTCTGAAGCAAGGGATTGTAATGG |
| | TCCCAGAAAACAATACAGAATATGTGAGAATCCACCTTGTCCTGCAGGTTTGCCTGGA |
| | TTCAGAGACTGGCAATGTCAGGCTTATAGTGTTAGAACTTCCTCCCCAAAGCATATAC |
| | TTCAGTGGCAAGCTGTCCTGGATGAAGkAAAACCATGTGCCTTGTTTTGCTCTCCTGT |
| | TGGAAAAGAACAGCCTATTCTTCTATCAGAAAAAGTGATGGATGGAACTTCTTGTGGC |
| | TATCAGGGATTAGATATCTGTGCAAATGGCAGGTGCCAGAAAGTTGGCTGTGATGGTT |
| | TATTAGGGTCTCTTGCAAGAGAAGATCATTGTGGTGTATGCAATGGCAATGGAAAATC |
| | ATGCAAGATCATTAAAGGGGATTTTAATCACACCAGAGGAGCAGGTTATGTACAAGTG |
| | CTGGTGATACCTGCTGGAGCAAGAAGAATCAGTTGTGGAGGAAAAAAGCCGGCACATA |
| | GCTATTTAGCTCTCCGAGATGCTGGCAACAGTCTATTTAATAGTGACTGGAGAATTGA |
| | ACACTCTGGAGCCTTCAATTTGGCTGGAACTACCGTTCATTATGTAAGACGAGGCCTC |
| | TGGGAGAAGATCTCTGCCAAAGGTCCTACTACAGCACCTTTACATCTTCTGGTGCTCC |
| | TGTTTCAGGATCAGAATTATGGTCTTCACTATGAATACACTATCCCATCAGACCCTCT |
| | TCCAGAAAACCAGAGCTCTAAAGCACCTGAGCCCCTCTTCATGTGGACACACACAAGC |
| | TGGGAAGATTGCGATGCCACTTGTGGAGGAGGAGAAAGGAAGACAACAGTGTCCTGCA |
| | CAAAAATCATGAGCAAAAATATCAGCATTGTGGACAATGAGATGCAAAAATACTTAAC |
| | CAAGCCAGAGACCACAGATTCGAAAGTGCAATGAGCAACCATGTCACAAAGGGAATAT |
| | CTAATAAGTCGTGTGAGTGCTACAAGCCAGGCAATAGAGAGCAAAGAAAAGGCCAGTC |
| | CCCATTGGTTGAATGGAGAAGCCCTTCTAGGAGGAATGGGCGTGGGGCTGGCTGTCAA |
| | GGATCCAGGCACAGGATTCTACAAATATCATGAGGTGAAAATAGAAAGTGTTTGGTGG |
| | ATGATGACAGAATGGACCCCTTGTTCACGAACTTGTGGAAAAGGAATGCAGAGCAGAC |
| | AAGTGGCCTGTACCCAACAACTGAGCAATGGAACACTGATTAGAGCCCGAGAGAGGGA |
| | CTGCATTGGGCCCAAGCCCGCCTCTGCCCAGCGCTGTGAGGGCCAGGACTGCATGACC |
| | GTGTGGGAGGCGGGAGTGTGGTCTGAGTGTTCAGTCAAGTGTGGCAAAGGCATACGTC |
| | ATCGGACCGTTAGATGTACCAACCCAAGAAAGAAGTGTGTCCTCTCTACCAGACCCAG |
| | GGAGGCTGAAGACTGTGAGGATTATTCAAAATGCTATGTGTGGCGAATGGGTGACTGG |
| | TCTAAGTGCTCAATTACCTGTGGCAAAGGAATGCAGTCCCGTGTAATCCAATGCATGC |
| | ATAAGATCACAGGAAGACATGGAAATGAATGTTTTTCCTCAGAAAAACCTGCAGCATA |
| | CAGGCCATGCCATCTTCAACCCTGCAATGAGAAAATTAATGTAAATACCATAACATCA |
| | CCCAGACTGGCTGCTCTGACTTTCAAGTGCCTGGGAGATCAGTGGCCAGTGTACTGCC |
| | GAGTGATACGTGAAAAGAACCTATGTCAGGACATGCGGTGGTATCAGCGCTGCTGTGA |
| | AACATGCAGGGACTTCTATGCCCAAAAGCTGCAGCAGAAGAGTTGACCTCTAGCAGGC |
| | TGGCTGGATCACAGCTCTTGGCAATTACATTATTTATAAACACACACACTAGCATGTT |
| | TTTCAGACCAAATATTATCAGATTACATATAATTTAATCAAATTAATTTATTTTTTTG |
| | CCTGCCAAACATCCAATGTGGTCCTTGTTTTGG |
| | ORF Start: ATG at 16 ORF Stop: TGA at 3814 |
| | SEQ ID NO: 124 1266 aa MW at 140434.5kD |
| NOV37b, | MRLTHICCCCLLYQLGFLSNGIVSELQFAPDREEWEVVFPALWRREPVDPAGGSGGSA |
| CG133589-02 | |
| Protein | DPGWVRGVGGGGSARAQkAGSSREVRSVAPVPLEEPVEGRSESRLRPPPPSEGEEDEE |
| Sequence | |
| | LESQFLPRGSSGAkALSPGAPASWQPPPPPQPPPSRPPAQHAEPDGDEVLLRIPAFSR |
| | DLYLLLRRDGRFLAPRFAVEQRPNPGPGPTGAASAPQPPAPPDAGCFYTGAVLRHPGS |
| | LASFSTCGGGLMGPIQLNEDFIFTERLNDTMAITGHPHRVYRQKREMEEKVTEKSALH |
| | SHYCGTISDKCRPRSRKIAESGRGKRYSYKLPQEYNIETVVVADPAMVSYHGADAARR |
| | FILTILNMVFNLFQHKSLGVQVNLRVIKLILLHETPPELYIGHHCEKMLESPCKWQHE |
| | EFGKKNDIHLEMSTNWGEDMTSVUKAILITPKDFCVHKDEPCDTVGIAYLSGMCSEKR |
| | KCIIAEDNGLNLAFTIAHEMGHNMGINHDNDHPSCADGLHTMSGEWIKGQNLGDVSWS |
| | RCSKEDLERFLRSKASNCLLQTHPQSVNSVMVPSKLPGMTYTADEQCQILFGPLASFC |
| | QEMQHVICTGLWCKVEGEKECRTKLDPPMDGTDCDLGKWCKAGECTSRTSAPEHLAGE |
| | WSLWSPCSRTCSAGISSRERKCPGLDSEARDCNGPRKQYRICENPPCPAGLPGPRDWQ |
| | CQAYSVRTSSPKHILQWQAVLDEEKPCALFCSPVGKEQPILLSEKVMDGTSCGYQGLD |
| | ICANGRCQKVGCDGLLGSLARPDHCGVCNGNGKSCKIIKGDPNHTRGAGYVEVLVIPA |
| | GARRIKVVEEKPAHSYLALRDAGKQSINSDWKIEHSGAFNLAGTTVHYVRRGLWEKIS |
| | AKGPTTAPLHLLVLLFQDQNYGLHYEYTIPSDPLPENQSSKAPEPLFMWTHTSWEDCD |
| | ATCGGGERKTTVSCTKIMSKNISIVDNEKCKYLTKPEPQIRKCNEQPCQTREYLISRV |
| | SATSQAIESKEKASPHWLNGEALLGGMGVGLAVKDPGTGFYKYHEVKIESVWWMMTEW |
| | TPCSRTCGKGMQSRQVACTQQLSNGTLIRARERDCIGPKPASAQRCEGQDCMTVWEAG |
| | VWSECSVKCGKCIRHRTVRCTNPRKKCVLSTRPREAEDCEDYSKCYVWRMGDWSKCSI |
| | TCGKGMQSRVIQCMHKITGRHGNECFSSEKPAAYRPCHLQPCNEKINVNTITSPRLAA |
| | LTFKCLGDQWPVYCRVIREKNLCQDMRWYQRCCETCRDFYAQKLQQKS |

[0517] Sequence comparison of the above protein sequences yields the following sequence relationships shown in Table 37B.

TABLE 37B
Comparison of NOV37a against NOV37b

| | | Identities/ |
|---|---|---|
| Portein | | Similarities for |
| Sequence | Match Residues | the Matched Region |
| NOV37b | 1 . . . 663 | 574/687 (83%) |
| | 488 . . . 1157 | 585/687 (84%) |

[0518] Further analysis of the NOV37a protein yielded the following properties shown in Table 37C.

TABLE 37C
Protein Sequence Properties NOV37a

| | |
|---|---|
| PSort | 0.3000 probability located in microbody (peroxisome); 0.3000 |
| analysis: | probability located in nucleus; 0.1000 probability located in |
| | mitochondrial matrix space; 0.1000 probability located in |
| | lysosome (lumen) |
| SignalP | No Known Signal Sequence Predicted |
| analysis: | |

[0519] A search of the NOV37a protein against the Geneseq database a proprietary database that contains sequences published in patents and patent publication, yielded several homologous proteins shown in Table 37D.

TABLE 37D
Geneseq Results for NOV37a

| | | NOV37a | | |
|---|---|---|---|---|
| | Protein/Organism/ | Residues/ | Identities/ | |
| Geneseq | Length [Patent #, | Match | Similarities for | Expect |
| Identifier | Date] | Residues | the Matched Region | Value |
| ABG01904 | Novel human diagnostic protein #1895- | 1 . . . 633 | 632/633 (99%) | 0.0 |
| | Homo sapiens, 634 aa. | 1 . . . 633 | 632/633 (99%) | |
| | [WO200175067-A2, 11 Oct. 2001] | | | |
| ABG01904 | Novel human diagnostic protein #1895- | 1 . . . 633 | 632/633 (99%) | 0.0 |
| | Homo sapiens, 634 aa. | 1 . . . 633 | 632/633 (99%) | |
| | [WO200175067-A2, 11 Oct. 2001] | | | |
| AAE21003 | Human protease #5-Homo sapiens, | 1 . . . 647 | 450/679 (66%) | 0.0 |
| | 969 aa. [WO200229026-A2, | 250 . . . 900 | 490/679 (71%) | |
| | 11 Apr. 2002] | | | |
| AAE21002 | Human protease #4-Homo sapiens, | 1 . . . 647 | 450/679 (66%) | 0.0 |
| | 1213 aa. [WO200229026-A2, | 494 . . . 1144 | 490/679 (71%) | |
| | 11 Apr. 2002] | | | |
| AAU72900 | Human metalloprotease partial protein | 1 . . . 647 | 450/679 (66%) | 0.0 |
| | sequence #12-Homo sapiens, 1094 aa. | 375 . . . 1025 | 489/679 (71%) | |
| | [WO200183782-A2, 8 Nov. 2001] | | | |

[0520] In a BLAST search of public sequence datbases, the NOV37a protein was found to have homology to the proteins shown in the BLASTP data in Table 37E.

TABLE 37E
Public BLASTP Results for NOV37a

| | | NOV37a | | |
|---|---|---|---|---|
| Protein | | Match | Identities/ | Expect |
| Number | Protein/Organism/Length | Residues | Matched Portion | Value |
| Q8TE59 | ADAMTS-19-Homo sapiens | 1 . . . 647 | 449/679 (66%) | 0.0 |
| | (Human), 1207 aa. | 488 . . . 1138 | 489/679 (71%) | |
| QSTE56 | Metalloprotease disintegrin 17, with | 224 . . . 647 | 184/434 (42%) | e−101 |
| | thrombospondin domains-Homo | 628 . . . 1023 | 256/434 (58%) | |
| | sapiens (Human), 1095 aa. | | | |
| CAC38921 | Sequence 2 from Patent WO0131034- | 2 . . . 608 | 207/637 (32%) | 7e−75 |
| | Homo sapiens (Human), 1686 aa. | 395 . . . 999 | 295/637 (45%) | |
| Q9EPX2 | Papilin-Mus musculus (Mouse), | 220 . . . 647 | 149/455 (32%) | 2e−56 |
| | 1280 aa. | 108 . . . 534 | 218/455 (47%) | |
| Q9U8G8 | Lacunin precursor-Manduca sexta | 222 . . . 663 | 153/464 (32%) | 7e−54 |
| | (Tobacco hawkmoth) (Tobacco | 143 . . . 593 | 212/464 (44%) | |
| | hornworm), 3198 aa. | | | |

[0521] PFam analysis predicts that the NOV37a protein contains the domains Shown in the Table 37F.

TABLE 37F
Domain Analysis of NOV37a

| | | Identities/ | |
|---|---|---|---|
| Pfam | NOV37a | Similarities for | Expect |
| Domain | Match Region | the Matched Region | Value |
| tsp_1 | 426 . . . 482 | 13/62 (21%) | 0.091 |
| | | 40/62 (65%) | |
| tsp_1 | 542 . . . 601 | 18/67 (27%) | 0.011 |
| | | 40/67 (60%) | |
| tsp_1 | 603 . . . 653 | 22/57 (39%) | 0.00014 |
| | | 36/57 (63%) | |

### Example 38

[0522] The NOV38 clone was analyzed, and the nucleotide and encoded polypeptide sequences are shown in Table 38A.

TABLE 38A
NOV38 Sequence Analysis

| | |
|---|---|
| | SEQ ID NO: 125 735 bp |
| NOV38a, | AGTGGCAAGATGGCGTCCCTGGATCGGGTGAAGGTACTGGTGTTGGGAGACTCAGGTG |
| CG133668-01 | |
| DNA | TTGGGAAATCTTCGTTAGTCCATCTCCTATGCCAAAATCAAGTGCTGGGAAATCCATC |
| Sequence | |
| | ATGGACTGTGGGCTGCTCAGTGGATGTCAGAGTTCATGATTACAAAGAAGGAACCCCA |
| | GAAGAGAAGACCTACTACATAGAATTATGGGATGTTGGAGGCTCTGTGGGCAGTGCCA |
| | GCAGCGTGAAAAGCACAAGAOCAGTATTCTACAACTCCGTAAATGGTATTATTTTCGT |
| | ACACGACTTAACAAATAAGAAGTCCTCCCAAAACTTGCGTCGTTGGTCATTGGAAGCT |
| | CTCAACAGGGATTTGGTGCCAACTGGAGTCTTGGTGACAAATGGGGATTATGATCAAG |
| | AACAGTTTGCTGATAACCAAATACCACTGTTGGTAATAGGGACTAAACTGGACCAGAT |
| | TCATGAAACAAAGCGCCATGAAGTTTTAACTAGGACTGCTTTCCTGGCTGAGGATTTC |
| | AATCCAGAAGAAATTAATTTGGACTGCACAAATCCACGGTACTTAGCTGCAGGTTCTT |
| | CCAATGCTGTCAAGCTCAGTAGGTTTTTTGATAAGGTCATAGAGAAGAGATACTTTTT |
| | AAGAGAAGGTAATCAGATTCCAGGCTTTCCTGATCGGAAAAGATTTGGGGCAGGAACA |
| | TTAAAGAGCCTTCATTATGACTGAATTACACTCATCCTT |
| | ORF Start: ATG at 10 ORF Stop: TGA at 718 |
| | SEQ ID NO: 126 236 aa MW at 26422.6kD |
| NOV38a, | MASLDRVKVLVLGDSGVGKSSLVHLLCQNQVLGNPSWTVGCSVDVRVHDYKEGTPEEK |
| CG133668-01 | |
| Protein | TYYIELWDVGGSVGSASSVKSTRAVFYNSVNGIIFVHDLTNKKSSQNLRRWSLEALNR |
| Sequence | |
| | DLVPTGVLVTNGDYDQEQFADNQIPLLVIGTKLDQIHETKRHEVLTRTAFLAEDFNPE |
| | EINLDCTNPRYLAAGSSNAVKLSRFFDKVIEKRYFLREGNQIPGFPDRKRFGAGTLKS |
| | LHYD |
| | SEQ ID NO: 127 739 bp |
| NOV38b, | AGTGGCAAGATCGCGTCCCTGGATCGGGTGAAGGTACTGGTGTTGGGAGACTCAGGTG |
| CG133668-02 | |
| DNA | TTGGGAAATCTTCGTTAGTCCATCTCCTATGCCAkAATCAAGTGCTGGGAAATCCATC |
| Sequence | |
| | ATGGACTGTGGGCTGCTCAGTGGATGTCAGAGTTCATGATTACAAAGAAGGAACCCCA |
| | GAAGAGAAGACCTACTACATAGAATTATGGGATGTTGGAGGCTCTGTGGGCAGTGCCA |
| | GCAGCGTGAAAAGCACAAGAGCAGTATTCTACAACTCCGTAAATGGTATTATTTTCGT |
| | ACACGACTTAACAAATAAGAAGTCCTCCCAAAACTTGCGTCGTTGGTCATTGGAAGCT |
| | CTCAACAGGGATTTGGTGCCAACTGGAGTCTTGGTGACAAATGGGGATTATGATCAAG |
| | AACAGTTTGCTGATAACCAAATACCACTGTTGGTAATAGGGACTAAACTGGACCAGAT |
| | TCATGAAACAAAGCGCCATGAAGTTTTAACTAGGACTGCTTTCCTGGCTGAGGATTTC |
| | AATCCAGAAGAAATTAATTTGGACTGCACAAATCCACGGTACTTAGCTGCAGGTTCCT |
| | CCAATGCTGTCAAGCTCAGTAGGTTTTTTGATAAGGTCATAGAGAAGAGATACTTTTT |
| | AAGAGAAGGTAATCAGATTCCAGGCTTTCCTGATCGGAAAAGATTTGGGGCAGGAACA |
| | TTAAAGAGCCTTCATTATGACTGAATTACACTCATCCTAAGGG |
| | ORF Start: at 10 ORF Stop: TGA at 718 |
| | SEQ ID NO: 128 236 aa MW at 26404.5kD |
| NOV38b, | IASLDRVKVLVLGDSGVGKSSLVHLLCQNQVLGNPSWTVGCSVDVRVHDYKEGTREEK |
| CG133668-02 | |
| Protein | TYYIELWDVGGSVGSASSVKSTRAVFYNSVNGIIFVHDLTNKKSSQNLRRWSLEALNR |
| Sequence | |
| | DLVPTGVLVTNGDYDQEQFADNQIPLLVIGTKLDQTHETKRHEVLTRTAFLAEDFNPE |
| | EINLDCTNPRYLAAGSSNAVKLSRFFDKVIEKRYFLREGNQTPGFPDRKRFGAGTLKS |
| | LHYD |

[0523] Sequence comparison of the above protein sequences yields tile following, sequence relationships shown in Table 38B.

TABLE 38B
Comparison of NOV38a against NOV38b

| | | Identities/ |
|---|---|---|
| Protein | NOV38a Residues/ | Similarities for |
| Sequence | Match Residues | the Matched Region |
| NOV38b | 1 . . . 236 | 222/236 (94%) |
| | 1 . . . 236 | 223/236 (94%) |

[0524] Further analysis of the NOV38a protein yielded the following properties shown in Table 38C.

TABLE 38C
Protein Sequence Properties NOV38a

| | |
|---|---|
| analysis: | (peroxisome); 0.1000 probability located in mitochondrial |
| | matrix space; 0.1000 probability located in lysosome (lumen) |
| SignalP | No Known Signal Sequence Predicted |
| analysis: | |

[0525] A search of the NOV38a protein against the Geneseq database, a proprietary database that contains sequences published in patents and patent publication yielded several homologous proteins shown in Table 38D.

TABLE 38D
Geneseq Results for NOV38a

| | | NOV38a | | |
|---|---|---|---|---|
| | Protein/Organism/ | Residues/ | Identities/ | |
| Geneseq | Length [Patent #, | Match | Similarities for | Expect |
| Identifier | Date] | Residues | the Matched Region | Value |
| AAE21568 | Human G-protein (47324) polypeptide- | 1 . . . 236 | 236/236 (100%) | e−136 |
| | Homo sapiens, 236 aa. [WO200218425- | 1 . . . 236 | 236/236 (100%) | |
| | A2, 7 Mar. 2002] | | | |
| AAU17369 | Novel signal transduction pathway | 1 . . . 231 | 210/231 (90%) | e−114 |
| | protein, Seq ID 934-Homo sapiens, | 4 . . . 232 | 212/231 (90%) | |
| | 269 aa [WO200154733-A1, | | | |
| | 2 Aug. 2001] | | | |
| AAY12450 | Human 5′ EST secreted protein SEQ ID | 1 . . . 125 | 121/125 (96%) | 3e−64 |
| | NO: 481-Homo sapiens 125 aa. | 1 . . . 125 | 121/125 (96%) | |
| | [WO9906548-A2, 11 Feb. 1999] | | | |
| ABB60970 | Drosophila melanogaster polypeptide | 1 . . . 231 | 113/264 (42%) | 2e−47 |
| | SEQ ID NO 9702-Drosophila | 6 . . . 264 | 157/264 (58%) | |
| | melanogaster, 279 aa. [WO200171042- | | | |
| | A2, 27 Sep. 2001] | | | |
| AAG49196 | Arabidopsis thaliana protein fragment | 6 . . . 150 | 54/155 (34%) | 4e−19 |
| | SEQ ID NO. 62211-Arabidopsis | 228 . . . 369 | 87/155 (55%) | |
| | thaliana, 606 aa. [EP1033405-A2, | | | |
| | 6 Sep. 2000] | | | |

[0526] In a BLAST search of public sequence datbases, the NOV38a protein was found to have homology to the proteins shown in the BLASTP data in Table 38E.

TABLE 38E
Public BLASTP Results for NOV38a

| | | NOV38a | | |
|---|---|---|---|---|
| Protein | | Residues/ | Identities/ | |
| Accession | | Match | Similarities for | Expect |
| Number | Protein/Organism/Length | Residues | the Matched Portion | Value |
| Q8WUD3 | Similar to RIKEN cDNA | 1 . . . 236 | 234/236 (99%) | e−134 |
| | 4930553C05 gene−Homo sapiens | 1 . . . 236 | 234/236 (99%) | |
| | (Human), 236 aa. | | | |
| Q9D4V7 | 4930553C05Rik protein-Mus | 1 . . . 236 | 218/236 (92%) | e−124 |
| | musculus (Mouse), 236 aa. | 1 . . . 236 | 221/236 (93%) | |
| Q9D0M6 | 4930553C05Rik protein-Mus | 1 . . . 129 | 123/129 (95%) | 1e−66 |
| | musculus (Mouse), 129 aa. | 1 . . . 129 | 124/129 (95%) | |
| Q8SZD5 | RE04047p-Drosophila | 1 . . . 231 | 113/264 (42%) | 4e−47 |
| | melanogaster (Fruit fly), 274 aa. | 1 . . . 259 | 157/264 (58%) | |
| Q9VXA9 | CG4789 protein-Drosophila | 1 . . . 231 | 113/264 (42%) | 4e−47 |
| | melanogaster (Fruit fly), 279 aa. | 6 . . . 264 | 157/264 (58%) | |

[0527] PFam analysis predicts that the NOV38a protein contains the domains shown in the Table 38F.

TABLE 38F
Domain Analysis of NOV38a

| | | Identities/ | |
|---|---|---|---|
| Pfam | | Similarities for | Expect |
| Domain | NOV38a Match Region | the Matched Region | Value |
| Ras | 8 . . . 231 | 42/239 (18%) | 1e−06 |
| | | 144/239 (60%) | |

### Example 39

[0528] The NOV39 clone was analyzed, and the nucleotide and encoded polypeptide sequences are shown in Table 39A.

TABLE 39A
NOV39 Sequence Analysis

| | |
|---|---|
| | SEQ ID NO: 129 3771 bp |
| NOV39a, | GGAGCCCTCCAGAGCGCTTCTCGGCTGCCTAGCGAGCGCCGCCGCTGCCGCCCCGCCG |
| CG133750-01 | |
| DNA | GGGGAGGATGGAGCAGGGGCCGGGGCCGAGGAGGAGGAGGAGGAGGAGGAGGAGGCGG |
| Sequence | |
| | CGGCGGCGGTGGGCCCCGGGGCAGCTGGGCTGCGACGCGCCGCTGCCCTACTGGACGG |
| | CCGTGTTCGAGTACGAGGCGGCGGGCGAGGACGAGCTGACCCTGCGGCTGGGCGACGT |
| | GGTGGAGGTCCTCTCCAAGGACTCGCAGGTGTCCGGCGACGAGGGCTGGTGGACCGGG |
| | CAGCTGAACCAGCGGGTGGGCATCTTCCCCAGCAACTACGTGACCCCGCGCAGCGCCT |
| | TCTCCAGCCGCTGCCAGCCCGGCGGCGAGGACCCCAGTTGCTACCCGCCCATTCAGTT |
| | GTTAGAPATTGATTTTGCGGAGCTCACCTTGGAAGAGATTATTGGCATCGGGGGCTTT |
| | GGGAAGGTCTATCGTGCTTTCTGGATAGGGGATGAGGTTCCTGTGAAAGCAGCTCGCC |
| | ACGACCCTGATGAGGACATCAGCCAGACCATAGAGAATGTTCCCCAAGAGGCCAAGCT |
| | CTTCGCCATGCTGAAGCACCCCAACATCATTGCCCTAAGAGGGGTATGTCTGAAGGAG |
| | CCCAACCTCTGCTTGGTCATGGAGTTTGCTCGTGGAGGACCTTTGAATAGAGTGTTAT |
| | CTGGGAAAAGGATTCCCCCAGACATCCTGGTGAATTGGGCTGTGCAGATTGCCAGACG |
| | GATGAACTACTTACATGATGAGGCAATTGTTCCCATCATCCACCGCGACCTTAAGTCC |
| | AGCAACATATTGATCCTCCAGAAGGTGGAGAATGGAGACCTGAGCAACAAGATTCTGA |
| | AGATCACTGATTTTGGCCTGGCTCGGGAATGGCACCGAACCACCAAGATGAGTGCGGC |
| | AGGGACGTATGCTTGGATGGCACCCGAAGTCATCCGGGCCTCCATGTTTTCCAAAGGC |
| | AGTGATGTGTGGAGCTATGGGGTGCTACTTTGGGAGTTGCTGACTGGTGAGGTGCCCT |
| | TTCGAGGCATTGATGGCTTAGCAGTCGCTTATGGAGTGGCCATGAACAAACTCGCCCT |
| | TCCTATTCCTTCTACGTGCCCAGAACCTTTTGCCAAACTCATGGAAGACTGCTGGAAT |
| | CCTGATCCCCACTCACGACCATCTTTCACGAATATCCTGGACCAGCTAACCACCATAG |
| | AGGAGTCTGGTTTCTTTGAAATCCCCAAGGACTCCTTCCACTGCCTGCAGGACAACTG |
| | GAAACACGAGATTCAGGAGATGTTTCACCAACTCAGGGCCAAAGAAAAGGAACTTCGC |
| | ACCTGGGAGGAGGAGCTGACGCGGGCTGCACTGCAGCAGAAGAACCAGGAGGAACTGC |
| | TGCGGCGTCGGGAGCAGGAGCTGGCCGAGCGGGAGATTGACATCCTGGAACGGGAGCT |
| | CAACATCATCATCCACCAGCTGTGCCAGGAGAAGCCCCGGGTGAAGAAACGCAAGGGC |
| | AAGTTCAGGAAGAGCCGGCTGAAGCTCAAGGATGGCAACCGCATCAGCCTCCCTTCTG |
| | ATTTCCAGCACAAGTTCACGGTGCAGGCCTCCCCTACCATGGATAAAAGGAAGAGTCT |
| | TATCAACAGCCGCTCCAGTCCTCCTGCAAGCCCCACCATCATTCCTCGCCTTCGAGCC |
| | ATCCAGTTGACACCACGTGAAAGCAGCAAAACCTGGGGCAGGAGCTCAGTCGTCCCAA |
| | GCCAGGGACGCTTGGTCAGAAAGAGCTTGCCTCGGGAGATGAAGGATCCCCTCAGAGA |
| | CGTGAGAAAGCTAATGGTTTAAGTACCCCATCAGAATCTCCACATTTCCACTTGGGCC |
| | TCAAGTCCCTGGTAGATGGATATAAGCAGTGGTCGTCCAGTGCCCCCAACCTGGTGAA |
| | GGGCCCAAGGAGTAGCCCGGCCCTGCCAGGGTTCACCAGCCTTATGGAGATGGCCTTG |
| | CTGGCAGCCAGTTGGGTGGTGCCCATCGACATTGAAGAGCATGAGCACAGTGAAGGCC |
| | CAGGCACTGGAGAGAGTCGCCTACAGCATTCACCCAGCCAGTCCTACCTCTGTATCCC |
| | ATTCCCTCGTGGAGAGGATGGCGATGGCCCCTCCAGTGATCGAATCCATGAGGAGCCC |
| | ACCCCAGTCATCTCGGCCACGAGTACCCCTCAGCTGACGCCAACCAACAGCCTCAAGC |
| | GGGGCGGTGCCCACCACCGCCGCTGCGAGGTGGCTCTGCTCGGCTGTGGGCCTGTTCT |
| | GGCAGCCACAGGCCTACGGTTTGACTTGCTGGAAGCTGGCAAGTGCCAGCTGCTTCCC |
| | CTGGAGGAGCCTGAGCCACCAGCCCGGGAGGAGAAGAAAAGACGGGAGGGTCTTTTTC |
| | ACAGGTCCAGCCGTCCTCGTCGGAGCACCAGCCCCCCATCCCGAAAGCTTTTCATGAA |
| | GGAGGAGCCCATGCTGTTGCTAGGAGACCCCTCTGCCTCCCTGACGCTGCTCTCCCTC |
| | TCCTCCATCTCCGAGTGCAACTCCACACGCTCCCTGCTGCGCTCCGACAGCGATGAAA |
| | TTGTCGTGTATGAGATGCCAGTCAGCCCAGTCGAGGCCCCTCCCCTGAGTCCATGTAC |
| | CCACAACCCCCTGGTCAATGTCCGAGTAGAGCGCTTCAAACGACATCCTAACCAATCT |
| | CTGACTCCCACCCATGTCACCCTCACCACCCCCTCGCAGCCCAGCAGTCACCGGCGGA |
| | CTCCTTCTGATGGGGCCCTTAAGCCAGAGACTCTCCTACCCAGCACGAGCCCCTCCAG |
| | CAATCGGTTGAGCCCCAGTCCTGGACCAGGAATGTTGAAAACCCCCAGTCCCAGCCGA |
| | GACCCAGGTGAATTCCCCCGTCTCCCTGACCCCAATGTGGTCTTCCCCCCAACCCCAA |
| | GGCGCTGGAACACTCAGCACGACTCTACCTTGGAGAGACCCAAGACTCTGGAGTTTCT |
| | GCCTCGGCCGCGTCCTTCTGCCAACCGGCAACGGCTGGACCCTTGGTGGTTTGTGTCC |
| | CCCAGCCATGCCCGCAGCACCTCCCCACCCAACAGCTCCAGCACAGAGACGCCCAGCA |
| | ACCTGGACTCCTCCTTTGCTAGCAGTAGCAGCACTGTAGAGGAGCGGCCTGGACTTCC |
| | AGCCCTGCTCCCGTTCCAGGCAGGGCCGCTGCCCCCGACTGAGCGGACGCTCCTGGAC |
| | CTGGATGCAGAGGGGCAGAGTCAGGACAGCACCGTGCCGCTGTGCAGAGCGGAACTGA |
| | ACACACACAGGCCTGCCCCTTATGAGATCCAGCAGGAGTTCTGGTCTTAGCACGAAAA |
| | GGATTGGGGCGGGCAAGGGCGACAGCCAGCGGAGATGAGGGGAGCTGGCGGGCACAGC |
| | CCTTTCTCAGGGTTCGACCCCCTGAGATCCAGCCCTACTTCTTGCACTGATAATGCAC |
| | TTTGAAGATGGAAGGGATGGAAACAGGGCCACTTCAGAGGGTCTCCTGCCCTGCAGGG |
| | CCTTTCTACCCGTGTCCACTGGAGGGGCTGTGGCCATCAGCTCTGGCTGTGTAGCGGA |
| | GGAAGGGGTGCATGCATGTCCCCCACCCTCCACAGTCTTCCTTGCCTTTAGAGTGACC |
| | CTGCACAGTCACTCAGCCAAATCTGTCTGCTGCTCCCTCTCCTCAGCCAGTTGGGTGT |
| | GCCCA |
| | ORF Start: ATG at 66 ORF Stop: TAG at 3354 |
| | SEQ ID NO: 130 1096 aa MW at 122187.8kD |
| NOV39a, | MEQGPGPRRRRRRRRRRRRRWAPGQLGCDAPLPYWTAVFEYEAAGEDELTLRLGDVVE |
| CG133750-01 | |
| Protein | VLSKDSQVSGDEGWWTGQLNQRVGTPPSNYVTPRSAFSSRCQPGGEDPSCYPPIQLLE |
| Sequence | |
| | TDFAELTLEEIIGIGGFGKVYRAFWIGDEVAVKAARHDPDEDISQTIENVRQEAKLFA |
| | MLKHPNTIALRGVCLKEPNLCLVMEFARGGPLNRVLSGKRIPPDILVNWAVQIARGMN |
| | YLHDEAIVPIIHRDLKSSNTLILQKVENGDLSNKILKITDFGLAREWHRTTKMSAAGT |
| | YAWMAPEVIRASMFSKGSDVWSYGVLLWELLTGEVPFRGIDGLAVAYGVAMNKLALPI |
| | PSTCPEPFAKLMEDCWNPDPHSRPSFTNILDQLTTIEESGFFEMPKDSFHCLQDNWKH |
| | EIQEMFDQLRAKFKELRTWEEELTRAALQQKNQEELLRRREQELAEREIDILERELNI |
| | IIHQLCQEKPRVKKRKGKFRKSRLKLKDGNRISLPSDFQHKFTVQASPTMDKRKSLIN |
| | SRSSPPASPTIIPRLRAIQLTPGESSKThGRSSVVPKEEGEEEEKRAPKKKGRTWGPG |
| | TLGQKELASGDEGSPQRREKANGLSTPSESPHPHLGLKSLVDGYKQWSSSAPNLVKGP |
| | RSSPALPGFTSLMEMALLAASWVVPIDIEEDEDSEGPGSGESRLQHSPSQSYLCIPFP |
| | RGEDGDGPSSDGIHEEPTPVNSATSTPQLTPTNSLKRGGAHHRRCEVALLGCGAVLAA |
| | TGLGPDLLEAGKCQLLPLEEPEPPAREEKKRREGLPQRSSRPRRSTSPPSRKLFKKEE |
| | PMLLLGDPSASLTLLSLSSISECNSTRSLLRSDSDEIVVYEMPVSPVEAPPLSPCTHN |
| | PLVNVRVERFKRDPNQSLTPTHVTLTTPSQPSSHRRTPSDGALKPETLLASRSPSSNG |
| | LSPSPGAGMLKTPSPSRDPGEFPRLPDPNVVPPPTPRRWNTQQDSTLERPKTLEFLPR |
| | PRPSANRQRLDPWWFVSPSHARSTSPANSSSTETPSNLDSCFASSSSTVEERPGLPAL |
| | LPFQAGPLPPTERTLLDLDAEGQSQDSTVPLCRAELNTHRPAPYEIQQEFWS |

[0529] Further analysis of the NOV39a protein yielded the following properties shown in Table 39B.

TABLE 39B
Protein Sequence Properties NOV39a

| | |
|---|---|
| PSort | 0.7999 probability located in mitochondrial inner |
| analysis: | membrane; 0.6064 probability located in nucleus; 0.6000 |
| | probability located in mitochondrial matrix space; 0.6000 |
| | probability located in mitochondrial intermembrane space |
| SignalP | No Known Signal Sequence Predicted |
| analysis: | |

[0530] A search of the NOV39a protein against the Geneseq database, a proprietary database that contains sequences published in patents and patent publication, yielded several homologous proteins shown in Table 39C.

TABLE 39C
Geneseq Results for NOV39a

| | | NOV39a | | |
|---|---|---|---|---|
| | Protein/Organism/ | Residues/ | Identities/ | |
| Geneseq | Length [Patent #, | Match | Similarities for | Expect |
| Identifier | Date] | Residues | the Matched Region | Value |
| AAE21717 | Human PKIN-12 protein-Homo | 4 . . . 1096 | 1037/1109 (93%) | 0.0 |
| | sapiens, 1097 aa. [WO200218557-A2, | 26 . . . 1097 | 1038/1109 (93%) | |
| | 7 Mar. 2002] | | | |
| AAE11775 | Human kinase (PKIN)-9 protein- | 4 . . . 1096 | 991/1093 (90%) | 0.0 |
| | Homo sapiens, 1046 aa. | 26 . . . 1046 | 993/1093 (90%) | |
| | [WO200181555-A2, 1 Nov. 2001] | | | |
| AAB85513 | Human protein kinase SGK067-Homo | 35 . . . 733 | 420/722 (58%) | 0.0 |
| | sapiens, 719 aa. [WO200155356-A2, | 43 . . . 712 | 520/722 (71%) | |
| | 2 Aug. 2001] | | | |
| ABB58999 | Drosophila melanogaster polypeptide | 35 . . . 560 | 274/526 (52%) | e−147 |
| | SEQ ID NO 3789 -Drosophila | 48 . . . 541 | 350/526 (66%) | |
| | melanogaster, 1020 aa. | | | |
| | [WO200171042-A2, 27 Sep. 2001] | | | |
| AAU78826 | Multiple lineage kinase 1 (MLK1)- | 62 . . . 251 | 189/190 (99%) | e−109 |
| | Unidentified, 194 aa. [WO200214536- | 5 . . . 194 | 190/190 (99%) | |
| | A2, 21 Feb. 2002] | | | |

[0531] In a BLAST search of public sequence databases, the NOV39a protein was found to have homology to the proteins shown in the BLASTP data in Table 39D.

TABLE 39D
Public BLASTP Results for NOV39a

| | | NOV39a | | |
|---|---|---|---|---|
| Protein | | Residues/ | Identities/ | |
| Accession | | Match | Similarities for | Expect |
| Number | Protein/Organism/Length | Residues | the Matched Portion | Value |
| Q9H2N5 | Mixed lineage kinase MLK1-Homo | 31 . . . 1096 | 1066/1066 (100%) | 0.0 |
| | sapiens (Human), 1066 aa | 1 . . . 1066 | 1066/1066 (100%) | |
| | (fragment). | | | |
| AAH30944 | Similar to mitogen-activated protein | 331 . . . 1096 | 694/769 (90%) | 0.0 |
| | kinase kinase kinase 9-Mus musculus | 1 . . . 732 | 709/769 (91%) | |
| | (Mouse), 732 aa (fragment). | | | |
| Q02779 | Mitogen-activated protein kinase | 33 . . . 1078 | 574/1066 (53%) | 0.0 |
| | kinase kinase 10 (EC 2.7.1.37) | 19 . . . 950 | 689/1066 (63%) | |
| | (Mixed lineage kinase 2) (Protein | | | |
| | kinase MST)-Homo sapiens | | | |
| | (Human), 954 aa. | | | |
| Q8WWN1 | Mixed lineage kinase 4beta-Homo | 35 . . . 1096 | 540/1112 (48%) | 0.0 |
| | sapiens (Human), 1036 aa. | 43 . . . 1036 | 688/1112 (61%) | |
| Q8VDG6 | Similar to mitogen-activated protein | 35 . . . 1094 | 491/1085 (45%) | 0.0 |
| | kinase kinase kinase 9-Mus musculus | 29 . . . 999 | 635/1085 (58%) | |
| | (Mouse), 1001 aa. | | | |

[0532] PFam analysis predicts that the NOV39a protein contains the domains shown in the Table 39E.

TABLE 39E
Domain Analysis of NOV39a

| | | Identities/ | |
|---|---|---|---|
| Pfam | | Similarities for | Expect |
| Domain | NOV39a Match Region | the Matched Region | Value |
| SH3 | 33 . . . 92 | 25/63 (40%) | 7.8e−15 |
| | | 50/63 (79%) | |
| Pkinase | 122 . . . 381 | 100/300 (33%) | 3.2e−94 |
| | | 217/300 (72%) | |

### Example 40

[0533] The NOV40 clone was analyzed, and the nucleotide and encoded polypeptide sequences are shown in Table 40A.

TABLE 40A
NOV40 Sequence Analysis

| | |
|---|---|
| | SEQ ID NO: 131 4803 bp |
| NOV40a, | AGAAGGAAGTGGCCTGGTGGATACACACCTGTTCTCTGCAGGCTCTTTCCTTGTCATG |
| CG133819-01 | |
| DNA | TTTCTCCCCTGGGGTTTGCAGCCTGGCTTTTCATTTTTAGTATCCTTCTGAAAGAAGA |
| Sequence | |
| | GAGAAAAATTTTCAGCAAAGAAGGCAAGTAAAAGATGAAAATTAAATTATGAGAATTA |
| | AAAAGACAACATTGAGCAGAGACATGAAAAAGGAAGGGAGGAAAAGGTGGAAAAGAAA |
| | AGAAGACAAGAAGCGAGTAGTGGTCTCTAACTTGCTCTTTGAAGGATGGTCTCACAAA |
| | GAGAACCCCAACAGACATCATCGTGGGAATCAAATCAAGACCAGCAAGTACACCGTGT |
| | TGTCCTTCGTCCCCAAAAACATTTTTGAGCAGCTACACCGGTTGGCCAATCTCTATTT |
| | TGTGGGCATTGCGGTTCTGAATTTTATCCCTGTGGTCAATGCTTTCCAGCCTGAGGTG |
| | AGCATGATACCAATCTGTGTTATCCTGGCAGTCACTGCCATCAAGGACGCTTGGGAAG |
| | ACCTCCGGAGGTACAAATCGGATAAAGTCATCAATAACCGAGAGTGCCTCATCTACAG |
| | CAGAAAAGAGCAGACCTATGTGCAGAAGTGCTGGAAGGATGTGCGCGTGCGAGACTTC |
| | ATCCAAATGAAATGCAATGAGATTGTCCCAGCAGACATACTCCTCCTTTTTTCCTCTG |
| | ACCCCAATGGGATATGCCATCTGGAAACTGCCAGCTTGGATGGAGAGACAAACCTCAA |
| | GCAAAGACGTGTCGTGAAGGGCTTCTCACAGCAGGAGGTACAGTTCGAACCAGAGCTT |
| | TTCCACAATACCATCGTGTGTGAGAAACCCAACAACCACCTCAACAAATTTAAGGGTT |
| | ATATGGAGCATCCTGACCAGACCAGGACTGGCTTTGGCTGTGAGAGTCTTCTGCTTCG |
| | AGGCTGCACCATCAGAAACACCGAGATGGCTGTTGGCATTGTCATCTATGCAGGCCAT |
| | GAGACGAAAGCCATGCTGAACAACAGTGGCCCCCGGTACAAACGCAGCAAGATTGAGC |
| | GGCGCATGAATATAGACATCTTCTTCTGCATTGGGATCCTCATCCTCATGTGCCTTAT |
| | TGGAGCTGTAGGTCACAGCATCTGGAATGGGACCTTTGAAAGACACCCTCCCTTCGAT |
| | GTGCCAGATGCCAATGGCAGCTTCCTTCCCAGTGCCCTTGGGGGCTTCTACATGTTCC |
| | TCACAATGATCATCCTGCTCCAGGTGCTGATCCCCATCTCTTTGTATGTCTCCATTGA |
| | GCTGGTGAAGCTCGGGCAAGTGTTCTTCTTGAGCAATGACCTTGACCTGTATGATGAA |
| | GAGACCGATTTATCCATTCAATGTCGAGCCCTCAACATCGCAGAGGACTTGGGCCAGA |
| | TCCAGTACATCTTCTCCGATAAGACGGGGACCCTGACAGAGAACAAGATGGTGTTCCG |
| | ACGTTGCACCATCATGGGCAGCGAGTATTCTCACCAAGAAAATGCTAAGCGACTGGAG |
| | ACCCCAAGGAGCTGGACTCAGATGGTGAAAGAGTGGACCCAATACCAATGCCTGTCCT |
| | TCTCGGCTAGATGGGCCCAGGATCCAGCAACTATGAGAAGCCAAAAAGGTGCTCAGCC |
| | TCTGAGGAGGAGCCAGAGTGCCCGGGTGCCCATCCAGGGCCACTACCGGCAAAGGTCT |
| | ATGGGGCACCGTGAAAGCTCACAGCCTCCTGTGGCCTTCAGCAGCTCCATAGAAAAAG |
| | ATGTAACTCCAGATAAAAACCTACTGACCAAGGTTCGAGATGCTGCCCTGTGGTTGGA |
| | GACCTTGTCAGACAGCAGACCTGCCAAGGCTTCCCTCTCCACCACCTCCTCCATTGCT |
| | GATTTCTTCCTTGACTTAACCATCTGCAACTCTGTCATGGTGTCCACAACCACCGAGC |
| | CCAGGCAGAGGGTCACCATCAAACCCTCAAGCAAGGCTCTGGGGACGTCCCTGGAGAA |
| | GATTCAGCAGCTCTTCCAGAAGTTGAAGCTATTGAGCCTCAGCCAGTCATTCTCATCC |
| | ACTGCACCCTCTGACACAGACCTCGGGGAGAGCTTAGGGGCCAACGTGGCCACCACAG |
| | ACTCGGATGAGAGAGATGATGCATCTGTGTGCAGTGGAGGTGACTCCACTGATGACGG |
| | TGGCTACAGGAGCAGCATGTGGGACCAGGGCGACATCCTGGAGTCTGGGTCAGGCACT |
| | TCCTTGGAGGAGGCATTGGAGGCCCCAGCCACAGACCTGGCCAGGCCTGAGTTCTGTT |
| | ACGAGGCTGAGAGCCCTGATGAGGCCGCCCTGGTGCACGCTGCCCATGCCTACAGCTT |
| | CACACTAGTGTCCCGGACACCTGAGCAGGTGACTGTGCGCCTGCCCCAGGGCACCTGC |
| | CTCACCTTCAGCCTCCTCTGCACCCTGGGCTTTGACTCTGTCAGGAAGAGAATGTCTG |
| | TGGTTGTGAGGCACCCACTGACTGGCGAGATTGTTGTCTACACCAAGGGTGCTGACTC |
| | GGTCATCATGGACCTGCTGGAAGACCCAGCCTGCGTACCTGACATTAATATGGAAAAG |
| | AAGCTGAGAPAAATCCGAGCCCGGACCCAAAAGCATCTAGACTTGTATGCAAGAGATG |
| | GCCTGCGCACACTATGCATTGCCAAGAAGGTTGTAAGCGAAGAGGACTTCCGGAGATG |
| | GGCCAGTTTCCGGCGTGAGGCTGAGGCATCCCTCGACAACCGAGATGAGCTTCTCATG |
| | GAAACTGCACAGCATCTGGAGAATCAACTCACCTTACTTGGAGCCACTGGGATCGAAG |
| | ACCGGCTGCAGGAAGGAGTTCCAGATACGATTGCCACTCTGCGGGAGGCTGGGATCCA |
| | GCTCTGGGTCCTGACTGGAGATAAGCAGGAGACAGCGGTCAACATTGCCCATTCCTGC |
| | AGACTGTTAAATCAGACCGACACTGTTTATACCATCAATACAGAGAATCAGGAGACCT |
| | GTGAATCCATCCTCAATTGTGCATTGGAAGAGCTAAAGCAATTTCGTGAACTACAGAA |
| | GCCAGACCGCAAGCTCTTTGGATTCCGCTTACCTTCCAAGACACCATCCATCACCTCA |
| | GAGCTGTGGTTCCAGAAGCTGGATTGGTCATCGATGGGTAAGACATTGAATGCCATCT |
| | TCCAGGGAAAGCTAGAGAAGAAGTTTCTGGAATTGACCCAGTATTGTCGGTCCGTCCT |
| | GTGCTGCCGCTCCACGCCACTCCAGAAGAGTATGATAGTCAAGCTGGTGCGAGACAAG |
| | TTGCGCGTCATGACCCTTTCCATAGGTGATGGAGCAAATGATGTAAGCATGATTCAAG |
| | CTGCTGATATTGGAATTGGAATATCTGGACAGGAAGGCATGCAGGCTGTCATGTCCAG |
| | CGACTTTGCCATCACCCGCTTTAAGCATCTCAAGAAGTTGCTGCTCGTGCATGGCCAC |
| | TGGTGTTACTCGCGCCTGGCCAGGATGGTGGTGTACTACCTCTACAAGAACGTGTGCT |
| | ACGTCAACCTGCTCTTCTGGTATCAGTTCTTCTGTGGTTTCTCCAGCTCCACCATGAT |
| | TGATTACTGGCAGATGATATTCTTCAATCTCTTCTTTACCTCCTTGCCTCCTCTTGTC |
| | TTTGGAGTCCTTGACAAAGACATCTCTGCAGAAACACTCCTGGCATTGCCTGAGCTAT |
| | ACAAGAGTGGCCAGAACTCTGAGTGCTATAACCTGTCGACTTTCTGGATTTCTATGGT |
| | GGATGCATTCTACCAGAGCCTCATCTGTTTCTTTATCCCTTACCTGGCCTATAAGGGC |
| | TCTGATATAGATGTCTTTACCTTTGGGACACCAATCAACACCATCTCCCTCACCACAA |
| | TCCTTTTGCACCAGGCAATGGAAATGAAGACATGGACCATTTTCCACGGAGTCGTGCT |
| | CCTCGGCAGCTTCCTGATGTACTTTCTGGTATCCCTCCTGTACAATGCCACCTGCGTC |
| | ATCTGCAACAGCCCCACCAATCCCTATTGGGTGATGGAAGGCCAGCTCTCAAACCCCA |
| | CTTTCTACCTCGTCTGCTTTCTCACACCAGTTGTTGCTCTTCTCCCAAGATACTTTTT |
| | CCTGTCTCTGCAAGGAACTTGTGGGAAGTCTCTAATCTCAAAAGCTCAGAAAATTGAC |
| | AAACTCCCCCCAGACAAAAGAAACCTGGAAATCCAGAGTTGGAGAAGCAGACAGAGGC |
| | CTGCCCCTGTCCCCGAAGTGGCTCGACCAACTCACCACCCAGTGTCATCTATCACAGG |
| | ACAGGACTTCAGTGCCAGCACCCCAAAGAGCTCTAACCCTCCCAAGAGGAAGCATGTG |
| | GAAGAGTCAGTACTCCACGAACAGAGATGTGGCACGGAGTGCATGAGGGATGACTCAT |
| | GCTCAGGGGACTCCTCAGCTCAACTCTCATCCGGGGAGCACCTGCTGGGACCTAACAG |
| | GATAATGGCCTACTCAAGAGGACAGACTGATATGTGCCGGTGCTCAAAGAGGAGCAGC |
| | CATCGCCGATCCCAGAGTTCACTGACCATATGAGGAGCTGCAGAAATCTGTACAAACT |
| | CAACAGAGGCCACCTAGTCACTGGTCCACATAACCCTTGACCCCTTCTTCTTCATAGA |
| | GGAAACAATGTGCCAGTCTTATTCTTTTCTTCAACAACCTTGACTTCCATGGAGGAAG |
| | TGCTGGCCCCAAGGGGTCTGACACAAAGACGGGAAACCCAGTCGGCCTCTAGTTTTCT |
| | GCTGCTCTCAGGCAGCACATCTTGCAAACAGTTTGGAGAAGGAGGCTGTTTTTGTTGA |
| | ATCGAGTTCTCAAATCGGTTTAGACCAAAGCCATTCTTCTGACCCTC |
| | ORF Start: ATG at 165 ORF Stop. TGA at 4497 |
| | SEQ ID NO: 132 1444 aa MW at 163004.1kD |
| NOV40a, | MRIKKTTLSRDMKKEGRKRWKRKEDKKRVVVSNLLFEGWSHKENPNRHHRGNQIKTSK |
| CG133819-01 | |
| Protein | YTVLSFVPKNIEEQLHRLANLYFVGIAVLNFIPVVNAFQPEVSMIPICVILAVTAIKD |
| Sequence | |
| | AWEDLRRYKSDKVINNRECLTYSRKEQTYVQKCWKDVRVGDFIQMKCNEIVPADILLL |
| | FSSDPNGICHLETASLDGETNLKQRRVVKGPSQQEVQFEPELFHNTIVCEKPNNHLNK |
| | FKGYMEHPDQTRTGFGCESLLLRGCTIRNTEMAVGIVIYAGHETKAMLNNSGPRYKRS |
| | KIERRMNIDIFFCIGTLILMCLIGAVGHSIWNGTFEEHPPFDVPDANGSFLPSALGGF |
| | YMFLTMITLLQVLIPISLYVSIELVKLGQVFFLSNDLDLYDEETDLSIQCRALNIAED |
| | LGQIQYIPSDKTGTLTENKMVFRRCTIMGSEYSHQENAKRLETPKELDSDGEEWTQYQ |
| | CLSFSARWAQDPATMRSQKGAQRLRRSQSARVPTQGHYRQRSMGHRESSQPPVAFSSS |
| | IEKDVTPDKNLLTKVRDAALWLETLSDSRPAKASLSTTSSIADFFLDLTTCNSVMVST |
| | TTEPRQRVTTKPSSKALGTSLEKIQQLFQKLKLLSLSQSFSSTAPSDTDLGESLGANV |
| | ATTDSDERDDASVCSGGDSTDDGGYRSSMWDQGDILESGSGTSLEEALEAPATDLARP |
| | EFCYEAESPDEAALVHAAHAYSFTLVSRTPEQVTVRLPQGTCLTFSLLCTLGPDSVRK |
| | RMSVVVRHPLTGEIVVYTKGADSVIMDLLEDPACVPDTNMEKKLRKIRARTQKHLDLY |
| | ARDGLRTLCIAKKVVSEEDFRRWASFRREAEASLDNRDELLMETAQHLENQLTLLGAT |
| | GIEDRLQEGVPDTTATLREAGIQLWVLTGDKQETAVNIAHSCRLLNQTDTVYTINTEN |
| | QETCESTLNCALEELKQFRELQKPDRKLPGFRLPSKTPSITSEAVVPEAGLVIDGKTL |
| | NAIFQGKLEKKFLELTQYCRSVLCCRSTPLQKSMTVKLVRDKLRVMTLSTGDGANDVS |
| | MIQAADIGIGISGQEGMQAVMSSDFATTRFKHLKKLLLVHGHWCYSRLARMVVYYLYK |
| | NVCYVNLLFWYQFFCGFSSSTMIDYWQMIFFNLPFTSLPPLVFGVLDKDISAETLLAL |
| | PELYKSGQNSECYNLSTFWISMVDAFYQSLTCFFIPYLAYKGSDIDVFTFGTPINTIS |
| | LTTILLHQAMEMKTWTIFHGVVLLGSFLMYFLVSLLYNATCVICNSPTNPYWVMEGQL |
| | SNPTFYLVCFLTPVVALLPRYFFL8LQGTCGKSLISKAQKIDKLPPDKRNLEIQSWRS |
| | RQRPAPVPEVARPTHHPVSSITGQDFSASTPKSSNPPKRKHVEESVLHEQRCGTECMR |
| | DDSCSGDSSAQLSSGEHLLGPNRTMAYSRGQTDMCRCSKRSSHRRSQSSLTI |

[0534] Further analysis of the NOV40a protein yielded the following properties shown in Table 40B.

TABLE 40B
Protein Sequence Properties NOV40a

| | |
|---|---|
| PSort | 0.6000 probability located in plasma membrane; 0.5165 |
| analysis: | probability located in mitochondrial inner membrane; |
| | 0.4000 probability located in Golgi body; 0.3200 |
| | probability located in nucleus |
| SignalP | No Known Signal Sequence Predicted |
| analysis: | |

[0535] A search of the NOV40a protein against the Geneseq database, a proprietary database that contains sequences published in patents and patent publication, yielded several homologous proteins shown in Table 40C.

TABLE 40C
Geneseq Results for NOV40a

| | | NOV40a | | |
|---|---|---|---|---|
| | Protein/Organism/ | Residues/ | Identities/ | |
| Geneseq | Length [Patent #, | Match | Similarities for | Expect |
| Identifier | Date] | Residues | the Matched Region | Value |
| AAE21185 | Human TRICH-29 protein-Homo | 14 . . . 1444 | 1313/1489 (88%) | 0.0 |
| | sapiens, 1519 aa. [WO200212340- | 34 . . . 1519 | 1356/1489 (90%) | |
| | A2, 14 Feb. 2002] | | | |
| AAE01984 | Human ATPase-related protein #7- | 52 . . . 1333 | 693/1296 (53%) | 0.0 |
| | Homo sapiens, 1426 aa. | 74 . . . 1351 | 916/1296 (70%) | |
| | [WO200134778-A2, 17 May 2001] | | | |
| AAE01982 | Human ATPase-related protein #5- | 52 . . . 1234 | 649/1197 (54%) | 0.0 |
| | Homo sapiens, 1270 aa. | 74 . . . 1252 | 849/1197 (70%) | |
| | [WO200134778-A2, 17 May 2001] | | | |
| AAU14142 | Human novel protein #13-Homo | 296 . . . 1375 | 545/1108 (49%) | 0.0 |
| | sapiens, 1194 aa. [WO200155437- | 1 . . . 1077 | 712/1108 (64%) | |
| | A2, 2 Aug. 2001] | | | |
| AAU14378 | Human novel protein #249-Homo | 296 . . . 1322 | 531/1039 (51%) | 0.0 |
| | sapiens, 1070 aa. [WO200155437- | 1 . . . 1010 | 689/1039 (66%) | |
| | A2, 2 Aug. 2001] | | | |

[0536] In a BLAST search of public sequence datbases, the NOV40a protein was found to have homology to the proteins shown in the BLASTP data in Table 40D.

TABLE 40D
Public BLASTP Results for NOV40a

| | | NOV40a | | |
|---|---|---|---|---|
| Protein | | Residues/ | Identities/ | |
| Accession | | Match | Similarities for | Expect |
| Number | Protein/Organism/Length | Residues | the Matched Portion | Value |
| O94823 | Potential phospholipid-transporting | 531 . . . 1444 | 913/914 (99%) | 0.0 |
| | ATPase VB (EC 3.6.3.1)-Homo | 1 . . . 914 | 913/914 (99%) | |
| | sapiens (Human), 914 aa (fragment). | | | |
| O54827 | Potential phospholipid-transporting | 9 . . . 1406 | 718/1445 (49%) | 0.0 |
| | ATPase VA (EC 3.6.3.1)-Mus | 13 . . . 1435 | 946/1445 (64%) | |
| | musculus (Mouse), 1508 aa. | | | |
| Q96914 | Putative aminophospholipid | 16 . . . 1375 | 713/1401 (50%) | 0.0 |
| | translocase (Aminophospholipid- | 15 . . . 1382 | 933/1401 (65%) | |
| | transporting ATPase)-Homo sapiens | | | |
| | (Human), 1499 aa. | | | |
| AAM20894 | P locus fat-associated ATPase-Mus | 141 . . . 1406 | 648/1300 (49%) | 0.0 |
| | musculus (Mouse), 1354 aa | 1 . . . 1281 | 854/1300 (64%) | |
| | (fragment). | | | |
| O60312 | Potential phospholipid-transporting | 326 . . . 1375 | 535/1077 (49%) | 0.0 |
| | ATPase VC (EC 3.6.3.1)-Homo | 1 . . . 1046 | 694/1077 (63%) | |
| | sapiens (Human), 1163 aa | | | |
| | (fragment). | | | |

[0537] PFam analysis predicts that the NOV40a protein contains the domains shown in the Table 40E.

TABLE 40E
Domain Analysis of NOV40a

| | | Identities/ | |
|---|---|---|---|
| Pfam | | Similarities for | Expect |
| Domain | NOV40a Match Region | the Matched Region | Value |
| Hydrolase | 410 . . . 1059 | 35/657 (5%) | 0.61 |
| | | 384/657 (58%) | |

### Example 41

[0538] The NOV41 clone was analyzed, and the nucleotide and encoded polypeptide sequences are shown in Table 41A.

TABLE 41A
NOV41 Sequence Analysis

| | |
|---|---|
| | SEQ ID NO: 133 569 bp |
| NOV41a, | TGCTTTGCAGATGCTGCCGTCGGGAGCTCTGTATTACCAGCCATGGTCAACCCCACCG |
| CG134375-01 | |
| DNA | TGTTCTTCCACATCTCTGTCGACGGTGAGTCCTTGGGCCGCATCTCTTTTGAGCTGTT |
| Sequence | |
| | TGCAGACAAGTTTCCAAAGACAGCAGAAAACTTTTGTGCTCTGAATACTGGAGAGAAA |
| | GGATTTGGTTACAAGGGTTGCTGCTTTCACAGAATTATTCCAGGGTTTATGTGTCATG |
| | GTGGTGACTTCACACACCATAATGGCACTGGTGGCAAGTCAATCTACGGGGAGAAAGT |
| | TGATGATGACAACTTCATCCTGAAGCATACAGGTCCTGGCATATTGTCCATGGCAAAT |
| | GCTGGACCCAACACAAATGGTTCCCAGTTTTTCATCTGCACTGCCAAGTCTGAGTGGT |
| | TGGATAGCAGCATGTGGTCATTGGCAAGGTGAGAAAGAAGCATGAATATTGTGGAGGC |
| | CATGGAGCACTTTGGGTCCAGGAATGGCAAGACCAGCAAGAAGGTCACCATTCCTGAC |
| | TTTGGACAACTCGAATAAGTTTGACTTGTGTTTTATCTTAACCACTG |
| | ORF Start: ATG at 43 ORF Stop: TAA at 538 |
| | SEQ ID NO: 134 165 aa MW at 18025.4kD |
| NOV41a, | MVNPTVFFHI8VDGESLGRISPELFADKFPKTAENFCALNTGEKGPGYKGCCFHRIIP |
| CG134375-01 | |
| Protein | GFMCHGGDFTHHNGTGGKSIYGEKVDDDNPILKHTGPGTLSMANAGPNTNGSQPFICT |
| Sequence | |
| | AKSFWLDSKHVVIGKVKEGMNIVEAMEHFGSRNGKTSKKVTIPDFGQLE |

[0539] Further analysis of the NOV41 a protein yielded the following properties shown in Table 41B.

TABLE 41B
Protein Sequence Properties NOV41a

| | |
|---|---|
| PSort | 0.6400 probability located in microbody (peroxisome); |
| analysis: | 0.4500 probability located in cytoplasm; 0.1000 probability |
| | located in mitochondrial matrix space; 0.1000 probability |
| | located in lysosome (lumen) |
| SignalP | No Known Signal Sequence Predicted |
| analysis: | |

[0540] A search of the NOV41at protein against the Geneseq database a proprietary database that contains sequences published in patents and patent publication, yielded several homologous proteins shown in Table 41C.

TABLE 41C
Geneseq Results for NOV41a

| | | NOV41a | | |
|---|---|---|---|---|
| | Protein/Organism/ | Residues/ | Identities/ | |
| Geneseq | Length [Patent #, | Match | Similarities for | Expect |
| Identifier | Date] | Residues | the Matched Region | Value |
| AAU01195 | Human cyclophilin A protein-Homo | 1 . . . 165 | 145/165 (87%) | 5e−84 |
| | sapiens, 165 aa. [WO200132876-A2, | 1 . . . 165 | 152/165 (91%) | |
| | 10 May 2001] | | | |
| AAW56028 | Calcineurin protein-Mammalia, 165 aa. | 1 . . . 165 | 145/165 (87%) | 5e−84 |
| | [WO9808956-A2, 5 Mar. 1998] | 1 . . . 165 | 152/165 (91%) | |
| AAG65275 | Haematopoietic stem cell proliferation | 2 . . . 165 | 144/164 (87%) | 2e−83 |
| | agent related human protein #2-Homo | 1 . . . 164 | 151/164 (91%) | |
| | sapiens, 164 aa. [JP2001163798-A, | | | |
| | 19 Jun. 2001] | | | |
| AAP90431 | Cyclophilin-Homo sapiens (human), | 2 . . . 165 | 144/164 (87%) | 2e−83 |
| | 164 aa. [EP326067-A, 2 Aug. 1989] | 1 . . . 164 | 151/164 (91%) | |
| AAG03831 | Human secreted protein, SEQ ID NO: | 1 . . . 165 | 144/165 (87%) | 3e−83 |
| | 7912-Homo sapiens, 165 aa. | 1 . . . 165 | 151/165 (91%) | |
| | [EP1033401-A2, 6 Sep. 2000] | | | |

[0541] In a BLAST search of public sequence datbases, the NOV41 a protein was found to have homology to the proteins shown in the BLASTP data in Table 41D.

TABLE 41D
Public BLASTP Results for NOV41a

| | | NOV41a | | |
|---|---|---|---|---|
| Protein | | Residues/ | Identities/ | |
| Accession | | Match | Similarities for | Expect |
| Number | Protein/Organism/Length | Residues | the Matched Portion | Value |
| CAC39529 | Sequence 26 from Patent WO0132876- | 1 . . . 165 | 145/165 (87%) | 1e−83 |
| | Homo sapiens (Human), 165 aa. | 1 . . . 165 | 152/165 (91%) | |
| Q9BRU4 | Peptidylprolyl isomerase A (cyclophilin | 1 . . . 165 | 144/165 (87%) | 4e−83 |
| | A)-Homo sapiens (Human), 163 aa. | 1 . . . 165 | 151/165 (91%) | |
| P05092 | Peptidyl-prolyl cis-trans isomerase A | 2 . . . 165 | 144/164 (87%) | 4e−83 |
| | (EC 5.2.1.8) (PPlase) (Rotamase) | 1 . . . 164 | 151/164 (91%) | |
| | (Cyclophilin A) (Cyclosporin A-binding | | | |
| | protein)-Homo sapiens (Human),, 164 | | | |
| | aa. | | | |
| P04374 | Peptidyl-prolyl cis-trans isomerase A | 2 . . . 164 | 143/163 (87%) | 1e−82 |
| | (EC 5.2.1.8) (PPlase) (Rotamase) | 1 . . . 163 | 150/163 (91%) | |
| | (Cyclophilin A) (Cyclosporin A-binding | | | |
| | protein)-Bos taurus (Bovine), and, 163 | | | |
| | aa. | | | |
| Q961X3 | Peptidylprolyl isomerase A (cyclophilin | 1 . . . 165 | 144/165 (87%) | 1e−82 |
| | A)-Homo sapiens (Human), 165 aa. | 1 . . . 165 | 151/165 (91%) | |

[0542] PFam analysis predicts that the NOV41 a protein contains the domains shown in the Table 41E.

TABLE 41E
Domain Analysis of NOV41a

| | | Identities/ | |
|---|---|---|---|
| Pfam | | Similarities for | Expect |
| Domain | NOV41a Match Region | the Matched Region | Value |
| pro_isomerase | 5 . . . 165 | 110/180 (61%) | 1.4e−93 |
| | | 144/180 (80%) | |

### Example 42

[0543] The NOV42 clone was analyzed, and the nucleotide and encoded polypeptide sequences are shown in Table 42A.

TABLE 42a
NOV42 Sequence Analysis

| | |
|---|---|
| | SEQ ID NO: 135 568 bp |
| NOV42a, | TAACCCATCTCCCTCACTCTTCCTGGGCACCACAGACATTCTCAAGTCCCCCCTGGAT |
| CG135546-01 | |
| DNA | GGGGGGCCCGGGCTGTGGCAAAGGGACACAGTGCAAGAATATGGCGACCAAGTACGGC |
| Sequence | |
| | TCTGCCATGTGGGGCTGGACCAGCTACTGAGACACAGAGGCTCAAAGGAGCACGCAGC |
| | GGGGCCGGCAGATCCGTGACATCACGCTGCAGGGGCTCCTGGTGCCCGCGGGCATCAT |
| | CCCAGATATGGTCAGTGACAACATGTTGTCCCGCCCGGAGAGCCGGGGCTTCCTCATC |
| | GATGGCTTTCCCCAGGAGGTGAAGCAGGCCATGGAGTTTGAGCGCATCGTGAGTGGCC |
| | CTGAAGTGTGGGTGTGGGTGGGCCAGGCCCCCAGCGTCGTCATCGTGTTTGACTGCTC |
| | CATGGAGACGATGCTCCGACGAGTGCTACACTGGGGCCAGGTGGAGCACCGGGCAGAC |
| | TCTTGACCTACCAGCGCAATAACCTGCTCTGAAACGTAGGTGCTCC |
| | ORF Start: ATG at 57 ORF Stop: TGA at 552 |
| | SEQ ID NO: 136 165 aa MW at 18653.3kD |
| NOV42a, | MGGPGCGKGTQCKNMATKYGFCHVGLDQLLRQEAQRSTQRGRQIRDITLQGLLVPAGI |
| CG135546-01 | |
| Protein | IPDMVSDNMLSRPESRGPLIDGFPQEVKQANEFERIVSGPEVWVWVGQARSVVIVFDC |
| Sequence | |
| | SMETMLRRVLHWGQVEHRADDSELAIHQRLDTHYTLCEPVLTYQRNNLL |

[0544] Further analysis of the NOV42a protein yielded the following properties shown in Fable 42B.

TABLE 42B
Protein Sequence Properties NOV42a

| | |
|---|---|
| PSort | 0.6500 probability located in cytoplasm; 0.2470 |
| analysis: | probability located in lysosome (lumen); 0.1000 |
| | probability located in mitochondrial matrix space; |
| | 0.0661 probability located in microbody (peroxisome) |
| SignalP | No Known Signal Sequence Predicted |
| analysis: | |

[0545] A search of the NOV42a protein against the Geneseq database, a proprietary database that contains sequences published in patents and patent publication, yielded several homologous proteins shown in Table 42C.

TABLE 42C
Geneseq Results for NOV42a

| | | NOV42a | | |
|---|---|---|---|---|
| | Protein/Organism/ | Residues/ | Identities/ | |
| Geneseq | Length [Patent #, | Match | Similarities for | Expect |
| Identifier | Date] | Residues | the Matched Region | Value |
| AAR10650 | Adenylate kinase-Sus scrofa, 194 aa. | 1 . . . 159 | 66/160 (41%) | 4e−30 |
| | [EP412526-A, 13 Feb. 1991] | 14 . . . 163 | 98/160 (61%) | |
| AAP93318 | Amino acid sequence of swine | 1 . . . 159 | 66/160 (41%) | 2e−29 |
| | adenylate kinase (SAK)-Sus scrofa, | 14 . . . 163 | 96/160 (59%) | |
| | 193 aa. [JP01051087-A, 27 Feb. 1989] | | | |
| AAU17301 | Novel signal transduction pathway | 1 . . . 159 | 66/160 (41%) | 4e−29 |
| | protein, Seq ID 866-Homo sapiens, 386 | 205 . . . 354 | 98/160 (61%) | |
| | aa. [WO200154733-A1, 2 Aug. 2001] | | | |
| AAU17300 | Novel signal transduction pathway | 1 . . .159 | 66/160 (41%) | 4e−29 |
| | protein, Seq ID 865-Homo sapiens, 245 | 65 . . . 214 | 98/160 (61%) | |
| | aa. [WO200154733-A1, 2 Aug. 2001] | | | |
| AAE11776 | Human kinase (PKIN)-10 protein- | 1 . . . 159 | 66/160 (41%) | 4e−29 |
| | Homo sapiens, 357 aa. [WO200181555- | 176 . . . 325 | 98/160 (61%) | |
| | A2, 1 Nov. 2001] | | | |

[0546] In a BLAST search of public sequence datbases, the NOV42a protein was found to have homology to the proteins shown in the BLASTP data in Table 42D.

TABLE 42D
Public BLASTP Results for NOV42a

| | | NOV42a | | |
|---|---|---|---|---|
| Protein | | Residues/ | Identities/ | |
| Accession | | Match | Similarities for | Expect |
| Number | Protein/Organism/Length | Residues | the Matched Portion | Value |
| P12115 | Adenylate kinase (EC 2.7.4.3) (ATP- | 1 . . . 159 | 66/160 (41%) | 2e−31 |
| | AMP transphosphorylase)-Cyprinus | 13 . . . 162 | 102/160 (63%) | |
| | carpio (Common carp), 193 aa. | | | |
| P05081 | Adenylate kinase isoenzymne 1 (EC | 1 . . . 16 | 66/162 (40%) | 2e−30 |
| | 2.7.4.3) (ATP-AMP transphosphorylase) | 15 . . . 166 | 103/162 (62%) | |
| | (AK1) (Myokinase)-Gallus gallus | | | |
| | (Chicken), 194 aa. | | | |
| Q920P5 | Adenylate kinase isozyme 5-Mus | 1 . . . 159 | 67/160 (41%) | 1e−29 |
| | musculus (Mouse), 193 aa. | 13 . . . 162 | 99/160 (61%) | |
| P00571 | Adenylate kinase isoenzyme 1 (EC | 1 . . . 159 | 66/160 (41%) | 1e−29 |
| | 2.7.4.3) (ATP-AMP transphosphorylase) | 14 . . . 163 | 98/160 (61%) | |
| | (AK1) (Myokinase)-Sus scrofa (Pig), | | | |
| | 194 aa. | | | |
| K1HUA | adenylate kinase (EC 2.7.4.3) 1 | 1 . . . 159 | 66/160 (41%) | 1e−29 |
| | (tentative sequence)-human, 194 aa. | 14 . . . 163 | 98/160 (61%) | |

[0547] PFam analysis predicts that the NOV42a protein contains the domains shown in the Table 42E.

TABLE 42E
Domain Analysis of NOV42a

| | | Identities/ | |
|---|---|---|---|
| Pfam | NOV42a | Similarities for | Expect |
| Domain | Match Region | the Matched Region | Value |
| adenylatekinase | 1 . . . 159 | 51/189 (27%) | 2.1e−25 |
| | | 110/189 (58%) | |

### Example 43

[0548] The NOV43 clone was analyzed, and the nucleotide and encoded polypeptide sequences are shown in Table 43A.

TABLE 43A
NOV43 Sequence Analysis

| | |
|---|---|
| | SEQ ID NO: 137 2876 bp |
| NOV43a, | TTTTTACCTGGAGTTGTATACTATGTGGACCGTTACTGGAAAGAATGGTTTTTTCATT |
| CG136321-01 | |
| DNA | TATGGAATCTTAGAGTTGGAAGGGATTTCAAGGTTAAAAGTTGTGCTCCTTGATATTG |
| Sequence | |
| | TAGGTGAAGAAATGGAGGCTCCAGGAGGTGATATGAGTAACCCACTGTCACAAGGCCA |
| | AACCTTTGAGGAAGCTGATAAGAATGGTGACGGCTTGCTGAATATTGAAGAGATACAT |
| | CAGCTGATGCATAAACTGAATGTTAATCTGCCCCGAAGAAAAGTCAGACAAATGTTTC |
| | AGGAAGCCGACACAGATGAGAATCAGGGAAACTTTGACATTTGAGAGTTCTGTGTTTT |
| | TTACAAAATGATGTCTTTGAGACGAGACCTTTATTTGTTACTTTTGAGCTACAGTGAC |
| | AAGAAAGATCACCTAACTGTGGAAGAACTGGCTCAGTTTTTGAAGGTGGAGCAAAAGA |
| | TGAATAATGTGACAACGGACTATTGTCTTGACATCATAAAGAAGTTTGAAGTTTCAGA |
| | AGAAAATAAGGTGAAAAATGTTCTTGGCATAGAAGGCTTCACGAACTTCATGCGTAGT |
| | CCTGCCTGTGACATATTTAACCCATTGCACCATGAAGTGTACCAAGACATGGATCAGC |
| | CCCTCTGCAACTACTACATTGCTTCCTCTCACAATACATACCTGACTGGAGACCAGCT |
| | CCTTTCTCAGTCCAAAGTGGATATGTATGCACGGGTGCTGCAAGAGGGCTGTCGCTGT |
| | GTGGAAGTTGACTGTTGGGATGGCCCAGATGGAGAGCCAGTAGTACATCATGGTTACA |
| | CTCTCACTTCAAAAATTCTCTTCAGAGATGTTGTGGAGACCATCAACAAGCATGCCTT |
| | TGTGAAGAATGAGTTTCCTGTTATATTGTCTATCGAGAATCACTGCAGTATCCAGCAG |
| | CAAGGAAGATTGCTCAGTACCTGAAAGGAATAATTCGGAGACAAACTGGACCTGTCAT |
| | CTGTTGATACAGGGGAGTGCAAGCAGCTTCCAAGCCCTCAAAGTTTGAAAGGCAAAAT |
| | TCTAGTGAAGGGTAAGAAGTTGCCTTATCACCTTGGGGATGATGCAGAGGAAGGGGAA |
| | GTTTCCGATGAGGACAGTGCAGATGAAATTGAAGACGAGTGCAAATTCAAGCTCCATT |
| | ATAGTAATGGGACCACTGAGCATCAGGTGGAATCTTTCATAAGGAAAAAACTGGAGTC |
| | ACTGTTAAAAGAATCTCAAATTCGAGATAAAGAAGATCCTGATAGTTTCACAGTGCGG |
| | GCACTACTGAAGGCCACGCATGAAGGCTTAAATGCACACCTGAAGCAGAGTCCAGATG |
| | TAAAGGAAAGTGGAAAGAAATCACATGGACGATCCCTCATGACCAACTTTGGAAAACA |
| | TAAGAAAACTACAAAATCACGGTCTAAATCTTACAGTACTGATGATGAGGAAGACACA |
| | CAGCAGAGTACTGGCAAGGAGGGTGGCCAGCTGTACAGATTGGGTCGCCGAAGGAAAA |
| | CCATGAAGCTCTGCCGAGAACTCTCTGATTTGGTTGTGTACACAAACTCCGTGGCCGC |
| | TCAGGACATTGTGGATGACGGAACCACAGGAAATGTGTTATCATTCAGTGAAACAAGA |
| | GCACATCAGGTTGTTCAGCAAAAATCAGAGCAGTTCATGATTTATAATCAAAAGCAAC |
| | TCACGAGGATTTACCCCTCTGCCTACCGCATTGATTCCAGTAACTTCAACCCTCTCCC |
| | CTACTGGAACGCAGGCTGCCAGCTAGTGGCACTGAATTATCAATCTGAAGGACGAATG |
| | ATGCAGTTAAACCGAGCCAAATTCAAGGCAAATGGCAATTGTGGCTATGTCCTCAAAC |
| | CCCAGCAAATGTGCAAAGGTACTTTCAACCCTTTCTCTGGTGACCCTCTTCCTGCCAA |
| | CCCCAAAAAGCAGCTCATCCTGAAAGTTATCAGTGGACAGCAACTCCCCAAACCTCCA |
| | GACTCCATGTTTGGAGATCGAGGCGAGATCATTGACCCTTTTGTTGAAGTTGAAATTA |
| | TTGGATTGCCAGTAGATTGTTGTAAAGATCAAACCCGTGTGGTAGATGACAATGGATT |
| | TAACCCTGTGTGGGAAGAAACACTGACATTTACAGTACACATGCCAGAAATAGCTTTG |
| | GTTCGGTTCCTTGTGTGGGATCACGATCCCATTGGACGAGACTTTGTTGGACAAAGAA |
| | CTGTGACCTTCAGCAGCTTAGTGCCTGGCTACCGGCATGTCTATTTGGAAGGACTGAC |
| | AGAAGCATCCATATTTGTACACATAACCATCAATGAAATCTATGGAAAGAACAGACAA |
| | CTCCAGGGTCTGAAGGGACTGTTCAATAAGAATCCTAGGCACAGTTCTTCAGAAAACA |
| | ATTCCCATTATGTACGGAAGCGATCCATTGGAGATAGTATTCTGCGACGCACAGCTAG |
| | CGCCCCAGCCAAAGGCAGGAAAAAGAGCAATGGGCTTCCAAGAAAAATGGTGGAGATA |
| | AAGGATTCTGTGTCCGAGGCCACAAGAGATCAAGATGGCGTGCTGAGGAGGACCACAC |
| | GCAGTTTGCAAGCACGCCCTGTCTCTATGCCTGTTGACAGAAACCTTCTGGGAGCTTT |
| | GTCGCTGCCTGTATCTGAAACAGCAAAAGACATTGAAGGAAAAGAAAACTCTCTAGAC |
| | TCTAGCTTTTGCAGGCCGACTGAGCAGGCTAAGCAGAAAAATGTGCAAGTGCCTTTCC |
| | CCAGACAGTTAGAATGTGTAATGAAGATGGAAATTTCCGAGACCTGAATCCCCAAACC |
| | CAGACTGATCTCTCTTCTCTTCTTGAATATAAAAGTAAGCTGGCAAGATTTAAAAAAC |
| | TGAACCCAAATAAATATTCATCATTTTTTTCTTC |
| | ORF Start: ATG at 23 ORF Stop: TGA at 2771 |
| | SEQ ID NO: 138 916 aa MW at 104019.2kD |
| NOV43a, | MWTVTGKNGFFIYGILELEGISRLKVVLLDIVGEEMEAPGGDMSNPLSQGQTFEEADK |
| CG136321-01 | |
| Protein | NGDGLLNIEEIHQLMHKLNVNLPRRKVRQMFQEADTDENQGTLTFEEFCVFYKMMSLR |
| Sequence | |
| | RDLYLLLLsYsDKKDHLTVEELAQFLKVEQKMNNVTTDYCLDIIKKFEVSEENKVKNV |
| | LGTEGPTNFMRSPACDIFNPLHHEVYQDMDQPLCNYYIASSHNTYLTGDQLLSQSKVD |
| | MYARVLQEGCRCVEVDCWDGPDGERVVHHGYTLTSKILFRDVVETTNKHAFVKNEFPV |
| | ILSIENHCSIQQQRKTAQYLKGIFGDKLDLSSVDTGECKQLPSPQSLKGKTLVKGKKL |
| | PYHLGDDAEEGEVSDEDSADEIEDECKFKLHYSNGTTEHQVESFIRKKLESLLKESQI |
| | RDKEDPDSFTVRALLKATHEGLNAHLKQSPDVKESGKKSHGRSLMTNFGKHKKTTKSR |
| | SKSYSTDDEEDTQQSTGKEGGQLYRLGRRRKTMKLCPELSDLVVYTNSVAAQDIVDDG |
| | TTGNVLSFSETRAHQVVQQKSEQFMIYNQKQLTRIYPSAYRIDSSNFNPLPYWNAGCQ |
| | LVALNYQSEGRMMQLNRAKPKANGNCGYVLKPQQMCKGTFNPFSGDRLPANPKKQLIL |
| | KVISGQQLPKPPDSMFGDRGEIIDPFVEVEIIGLPVDCCKDQTRVVDDNGFNPVWEET |
| | LTFTVHMPEIALVRFLVWDHDPIGRDFVGQRTVTFSSLVPGYRHVYLEGLTEASIFVH |
| | ITINEIYGKNRQLQGLKGLPNKNRRHSSSENNSHYVRKRSIGDRILRRTASAPAKGRK |
| | KSKMGFQEMVETKDSVSEATRDQDGVLRRTTRSLQARPVSMPVDRNLLGALSLPVSET |
| | AKDIEGKEN8LDSSFCRPTEQAKAEMCKVPFPRQLECVMKMEISET |

[0549] Further analysis of the NOV43a protein yielded the following properties shown in Table 43B.

TABLE 43B
Protein Sequence Properties NOV43a

| | |
|---|---|
| PSort | 0.9600 probability located in nucleus; 0.3000 probability |
| analysis: | located in microbody (peroxisome); 0.1000 probability located |
| | in mitochondrial matrix space; 0.1000 probability located in |
| | lysosome (lumen) |
| SignalP | No Known Signal Sequence Predicted |
| analysis: | |

[0550] A search of the NOV43a protein against the Geneseq database, a proprietary database that contains sequences published in patients and patent publication, yielded several homologous proteins shown in Table 43C.

TABLE 43C
Geneseq Results for NOV43a

| | | NOV43a | | |
|---|---|---|---|---|
| | Protein/Organism/ | Residues/ | Identities/ | |
| Geneseq | Length [Patent #, | Match | Similarities for | Expect |
| Identifier | Date] | Residues | the Matched Region | Value |
| ABG13669 | Novel human diagnostic protein #13660- | 118 . . . 881 | 764/784 (97%) | 0.0 |
| | Homo sapiens, 787 aa. [W0200175067- | 1 . . . 784 | 764/784 (97%) | |
| | A2, 11 Oct. 2001] | | | |
| ABG13669 | Novel human diagnostic protein #13660- | 118 . . . 881 | 764/784 (97%) | 0.0 |
| | Homo sapiens, 787 aa. [WO200175067- | 1 . . . 784 | 764/784 (97%) | |
| | A2, 11 Oct. 2001] | | | |
| ABB08205 | Human lipid metabolism enzyme-5 | 51 . . . 834 | 505/823 (61%) | 0.0 |
| | (LME-5)-Homo sapiens, 1239 aa. | 171 . . . 989 | 623/823 (75%) | |
| | [WO200185956-A2, 15 Nov. 2001] | | | |
| AAB95125 | Human protein sequence SEQ ID | 451 . . . 916 | 466/466 (100%) | 0.0 |
| | NO: 17124-Homo sapiens, 466 aa. | 1 . . . 466 | 466/466 (100%) | |
| | [EP1074617-A2, 7 Feb. 2001] | | | |
| ABB07493 | Human lipid metabolism molecule | 51 . . . 481 | 271/433 (62%) | e−157 |
| | (LMM) polypeptide (ID: 2965233CD1)- | 173 . . . 604 | 340/433 (77%) | |
| | Homo sapiens, 621 aa. [WO200204490- | | | |
| | A2, 17 Jan. 2002] | | | |

[0551] In a BLAST search of public sequence datbases, the NOV43a protein was found to have homology to the proteins shown in the BLASTP data in Table 43D.

TABLE 43D
Public BLASTP Results for NOV43a

| | | NOV43a | | |
|---|---|---|---|---|
| Protein | | Residues/ | Identities/ | |
| Accession | | Match | Similarities for | Expect |
| Number | Protein/Organism/Length | Residues | the Matched Portion | Value |
| Q9UPT3 | KIAA1069 protein-Homo sapiens | 118 . . . 881 | 764/784 (97%) | 0.0 |
| | (Human), 787 aa (fragment). | 1 . . . 784 | 764/784 (97%) | |
| Q9H9U2 | CDNA FLJ12548 fis, clone | 451 . . . 916 | 466/466 (100%) | 0.0 |
| | NT2RM4000657, weakly similar to 1- | 1 . . . 466 | 466/466 (100%) | |
| | phosphatidylinositol-4,5-bisphosphate | | | |
| | phosphodiesterase delta 1 (EC 3.1.4.11)- | | | |
| | Homo sapiens (Human), 466 aa. | | | |
| Q8TEH5 | FLJ00222 protein-Homo sapiens | 444 . . . 834 | 243/395 (61%) | e−138 |
| | (Human), 656 aa (fragment). | 15 . . . 406 | 304/395 (76%) | |
| Q8WUS6 | Hypothetical 75.7 kDa protein-Homo | 577 . . . 834 | 179/261 (68%) | e−101 |
| | sapiens (Human), 716 aa (fragment). | 1. . . 261 | 211/261 (80%) | |
| Q91UZ1 | Phospholipase C beta 4-Mus musculus | 102 . . . 757 | 933/687 (33%) | 4e−89 |
| | (Mouse), 1175 aa. | 205 . . . 820 | 351/687 (50%) | |

[0552] PFam analysis predicts that the NOV43a protein contains the domains shown in the Table 43E.

TABLE 43E
Domain Analysis of NOV43a

| | | Identities/ | |
|---|---|---|---|
| Pfam | NOV43a | Similarities for | Expect |
| Domain | Match Region | the Matched Region | Value |
| efhand | 48 . . . 26 | 11/29 (38%) | 0.016 |
| | | 22/29 (76%) | |
| RrnaAD | 76 . . . 111 | 6/42 (14%) | 0.13 |
| | | 27/42 (64%) | |
| efhand | 84 . . . 113 | 10/30 (33%) | 0.027 |
| | | 27/30 (90%) | |
| PI-PLC-X | 202 . . . 347 | 80/153 (52%) | 1.1e−68 |
| | | 122/153 (80%) | |
| PI-PLC-Y | 502 . . . 616 | 50/128 (39%) | 6.8e−42 |
| | | 82/128 (64%) | |
| C2 | 636 . . . 728 | 38/102 (37%) | 1.8e−27 |
| | | 78/102 (76%) | |

### Example 44

[0553] The NOV44 clone was analyzed, and the nucleotide and encoded polypeptide sequences arc shown in Table 44A.

TABLE 44A
NOV44 Sequence Analysis

| | |
|---|---|
| | SEQ ID NO: 139 1742 bp |
| NOV44a, | TAATTTAAACCAGTGTTTGTGCGGTTCTGATTCATCTGCTGTGGTTCCCGAAGCTTGA |
| CG136648-01 | |
| DNA | GATCTAAGGAGTACAGGGTCTTTTGTGATGACAATATGACTAATAGTAAAGGAAGATC |
| Sequence | |
| | TATTACCGATAAAACAAGTGGTGGTCCAAGTAGTGGAGGAGCTTTTGTAGATTGGACT |
| | TTACGTTTAAACACAATTCAATCCGACAAGTTTTTAAATTTACTCTTGAGTATGGTTC |
| | CAGTGATTTACCAGAAAAACCAAGAAGACAGGCACAAAAAAGCAAACGGCATTTGGCA |
| | AGATGGATATCAACTGCAGTACAGACTTTTAGTAATAGATCTGAGCAACACATGGAGT |
| | ATCACAGTTTCTCAGAGCAGTCTTTTCATGCCAATAATGGGCACGCATCATCAAGCTG |
| | CAGCCAAAAGTATGATGACTATGCCAATTGTAATTACTGTGATGGAAGGGAGACTTCA |
| | GAAACCACTGCCATGTTACAAGATGAAGATATATCTAGTGATGGTGATGAAGATGCTA |
| | TTGTAGAAGTGACCCCAAAATTACCAAAGGAATCCAGTGGCATCATGGCATTGCAAAT |
| | ACTTGTGCCCTTTTTGCTAGCTCGTTTTGGAACAGTTTCAGCTGGCATGGTACTGGAT |
| | ATAGTACAGCACTGGGAGGTGTTCAGAAAAGTTACAGAAGTTTTCATTTTAGTCCCTG |
| | CACTTCTTGGTCTCAAAGGGAACTTGGAAATGACATTGGCATCCAGATTATCCACTGC |
| | AGTAAATATTGGGAAGATGGATTCACCCATTGAAAAGTGGAACCTAATAATTGGCAAC |
| | TTGGCTTTAAAGCAGGGAATAATAATGGTTGGGGTTATCGTTGGTTCAAAGAAGACTG |
| | GTATAAATCCTGATAATGTTGCTACACCCATTGCTGCTAGTTTTGGCGACCTTATAAC |
| | TCTTGCCATATTGGCTTGGATAAGTCAGGGCTTATACTCCTGTCTTGAGACCTATTAC |
| | TACATTTCTCCATTAGTTGGTGTATTTTTCTTGGCTCTAACCCCTATTTGGATTATAA |
| | TAGCTGCCAAACATCCAGCCACAAGAACAGTTCTCCACTCAGGCTGGGAGCCTGTCAT |
| | AACAGCTATGGTTATAAGTAGCATTGGGGGCCTTATTCTGGACACAACTGTATCAGAC |
| | CCAAACTTGGTTGGGATTGTTGTTTACACGCCAGTTATTAATGGTATTGGTGGTAATT |
| | TGGTGGCCATTCAGGCTAGCAGGATTTCTACCTACCTCCATTTACATAGCATTCCAGG |
| | AGAATTGCCTGATGAACCCAPAGGTTGTTACTACCCATTTAGAACTTTCTTTGGTCCA |
| | GGAGTAAATAATAAGTCTGCTCAAGTTCTACTGCTTTTAGTGATTCCTGGACATTTAA |
| | TTTTCCTCTACACTATTCATTTGATGAAAACTGGTCATACTTCTTTAACTATAATCTT |
| | CATAGTAGTGTATTTATTTGGCGCTGTGTTACAGGTATTTACCTTGCTGTGGATTGCT |
| | GACTGGATGGTCCATCACTTCTGGAGGAAAGGAAAGGACCCGGATAGTTTCTCCATCC |
| | CCTACCTAACAGCATTGGGTGATCTGCTCGGGACAGCTCTGTTAGCCTTAAGTTTTCA |
| | TTTTCTTTGGCTTATTGGAGATCGAGATGGAGATGTTGGAGACTAATAAATTCTACAA |
| | ACTGCTCTCAAGTTACCAAGGAAGAAAATACACGACAACCACTTATCGCTCTTTTTCA |
| | AA |
| | ORF Start: ATG at 342 ORF Stop: TAA at 1668 |
| | SEQ ID NO: 140 442 aa MW at 48201.3kD |
| NOV44a, | MEYHSFSEQSFHANNGHASSSCSQKYDDYANCNYCDGRETSETTAMLQDEDISSDGDE |
| CG136648-01 | |
| Protein | DAIVEVTPKLPKESSGTMALQILVPFLLAGFGTVSAGMVLDIVQHWEVFRKVTEVFIL |
| Sequence | |
| | VPALLGLKGNLEMTLASRLSTAVNIGKMDSPIEKWNLITGNLALKQGITMVGVIVGSK |
| | KTGINPDNVATPIAASFGDLITLAILAWISQGLYSCLETYYYISPLVGVFFLALTPIW |
| | IIIAAKHPATRTVLHSGWEPVTTAMVISSTGGLILDTTVSDPNLVGIVVYTPVINGIG |
| | GNLVAIQASRTSTYLHLHSIPGELPDEPKGCYYPFRTFFGPGVNNKSAQVLLLLVIPG |
| | HLIFLYTIHLMKSGHTSLTIIFIVVYLFGAVLQVFTLLWTADWMVHHFWRKGKDPDSF |
| | SIPYLTALGDLLGTALLALSFHFLWLIGDRDGDVGD |

[0554] Further analysis of the NOV44a protein yielded the following properties shown in Table 44B.

TABLE 44B
Protein Sequence Properties NOV44a

| | |
|---|---|
| PSort | 0.6000 probability located in plasma membrane; 0.4000 |
| analysis: | probability located in Golgi body: 0.3000 probability |
| | located in endoplasmic reticulum (membrane); 0.3000 |
| | probability located in microbody (peroxisome) |
| SignalP | No Known Signal Sequence Predicted |
| analysis: | |

[0555] A search of the NOV44a protein against the Geneseq database, a proprietary database that contains sequences published in patents and patent publication, yielded several homologous proteins shown in Table 44C.

TABLE 44C
Geneseq Results for NOV44a

| | | NOV44a | | |
|---|---|---|---|---|
| | Protein/Organism/ | Residues/ | Identities/ | |
| Geneseq | Length [Patent #, | Match | Similarities for | Expect |
| Identifier | Date] | Residues | the Matched Region | Value |
| AAB95482 | Human protein sequence SEQ ID | 1 . . . 442 | 442/490 (90%) | 0.0 |
| | NO: 18007-Homo sapiens, 490 aa | 1 . . . 490 | 442/490 (90%) | |
| | [EP1074617-A2, 7 Feb. 2001] | | | |
| ABB08638 | Human transporter protein SEQ ID NO | 42 . . . 442 | 274/453 (60%) | e−148 |
| | 2-Homo sapiens, 513 aa. | 62 . . . 513 | 328/453 (71%) | |
| | [WO200190360-A2, 29 Nov. 2001] | | | |
| AAM47910 | Human initiation factor 46-Homo | 85 . . . 433 | 189/398 (47%) | 1e−92 |
| | sapiens, 414 aa. [CN1307045-A, | 1 . . . 397 | 246/398 (61%) | |
| | 8 Aug. 2001] | | | |
| AAB93857 | Human protein sequence SEQ ID | 64 . . . 433 | 172/382 (45%) | 7e−78 |
| | NO: 13719-Homo sapiens, 438 aa. | 48 . . . 421 | 233/382 (60%) | |
| | [EP1074617-A2, 7 Feb. 2001] | | | |
| AAB94260 | Human protein sequence SEQ ID | 64 . . . 421 | 165/376 (43%) | 2e−75 |
| | NO: 14667-Homo sapiens, 464 aa. | 48 . . . 422 | 228/376 (59%) | |
| | [EP1074617-A2, 7 Feb. 2001] | | | |

[0556] In a BLAST search of public sequence datbases, the NOV44a protein was found to have homology to the proteins shown in the BLASTP data in Table 44D.

TABLE 44D
Public BLASTP Results for NOV44a

| | | NOV44a | | |
|---|---|---|---|---|
| Protein | | Residues/ | Identities/ | |
| Accession | | Match | Similarities for | Expect |
| Number | Protein/Organism/Length | Residues | the Matched Portion | Value |
| Q96JW4 | CDNA FLJ14932 fis, clone | 1 . . . 442 | 442/490 (90%) | 0.0 |
| | PLACE1009639-Homo sapiens | 1 . . . 490 | 442/490 (90%) | |
| | (Human), 490 aa. | | | |
| Q9H0E5 | Hypothetical 53.3 kDa protein- | 1 . . . 442 | 441/490 (90%) | 0.0 |
| | Homo sapiens (Human), 490 aa. | 1 . . . 490 | 441/490 (90%) | |
| Q9HAB1 | Hypothetical 47.2 kDa protein- | 64 . . . 433 | 172/382 (45%) | 2e−77 |
| | Homo sapiens (Human), 438 aa. | 48 . . . 421 | 233/382 (60%) | |
| Q9H9I6 | CDNA FLJ12718 fis, clone | 64 . . . 421 | 165/376 (43%) | 5e−75 |
| | NT2RP1001286-Homo sapiens | 48 . . . 422 | 228/376 (59%) | |
| | (Human), 464 aa. | | | |
| Q9NX30 | CDNA FLJ20473 fis, clone | 64 . . . 421 | 165/376 (43%) | 5e−75 |
| | KAT07092-Homo sapiens | 48 . . . 422 | 228/376 (59%) | |
| | (Human), 471 aa. | | | |

[0557] PFam analysis predicts that the NOV44a protein contains the domains shown in the Table 44E.

TABLE 44E
Domain Analysis of NOV44a

| | | Identities/ | |
|---|---|---|---|
| Pfam | NOV44a | Similarities for | Expect |
| Domain | Match Region | the Matched Region | Value |
| MgtE | 116 . . . 204 | 29/137 (21%) | 3.2e−06 |
| | | 77/137 (56%) | |
| MgtE | 282 . . . 428 | 31/153 (20%) | 7.4e−07 |
| | | 106/153 (69%) | |

### Example 45

[0558] The NOV45 clone was analyzed, and the nucleotide and encoded polypeptide sequences are shown in Table 45A.

TABLE 45A
NOV45 Sequence Analysis

| | |
|---|---|
| | SEQ ID NO 141 2200 bp |
| NOV45a | TGCAGCCTCCAGCCAGAAGGATGGGGTGGCTCCCACTCCTGCTGCTTCTGACTCAATG |
| CG54479-01 | |
| DNA | CTTAGGGGTCCCTGGGCAGCGCTCGCCATTGAATGACTTCGAGGTGCTCCGGGGCACA |
| Sequence | |
| | GAGCTACAGCGGCTGCTACAAGCGGTGGTGCCCGGGCCTTGGCAGGAGGATGTGGCAG |
| | ATGCTGAAGAGTGTGCTGGTCGCTGTGGGCCCTTAATGGACTGCCGGGCGTTCCACTA |
| | CAATGTGAGCAGCCATGGTTGCCAACTGCTGCCATGGACTCAACACTCACCCCACACG |
| | AGGCTGCGGCATTCTGGGCGCTGTGACCTCTTCCAGGAGAAAGACTACATACGGACCT |
| | GCATCATGAACAATGGGGTTGGGTACCGGGGCACCATGGCCACGACCGTGGGTGGCCT |
| | GTCCTGCCAGGCTTGGAGCCACAAGTTCCCGAACGATCACAGGTACATGCCCACGCTC |
| | CGGAATGGCCTGGAAGAGAACTTCTGCCGTAACCCTGATGGCGACCCCGGAGGTCCTT |
| | GGTGCCACACAACAGACCCTCCCGTGCGCTTCCAGAGCTGCGGCATCAAATCCTGCCG |
| | GTCTGCCGCGTGTGTCTGGTGCAATGGCGAGGAATACCGCGGCGCGGTAGACCGCACC |
| | GAGTCAGGGCGCGAGTGCCAGCGCTGGGATCTTCAGCACCCGCACCAGCACCCCTTCG |
| | AGCCGGGCAAGTACCCCCACCAAGGTCTGGACGACAACTATTGCCGGAATCCTGACGG |
| | CTCCGAGCGGCCATGGTGCTACACTACGGATCCGCAGATCGAGCGAGAATTCTGTGAC |
| | CTCCCCCGCTGCGGTTCCGAGGCACAGCCCCGCCAAGAGGCCACAAGTGTCAGCTGCT |
| | TCCGCGGGAAGGGTGAGGGCTACCGGGGCACAGCCAATACCACCACCGCGGGCGTACC |
| | TTGCCAGCGTTGGGACGCGCAAATCCCGCATCAGCACCGATTTACGCCAGAAAAATAC |
| | GCGTGCAAGGACCTTCGGGAGAACTTCTGCCGGAACCCCGACGGCTCAGAGGCGCCCT |
| | GGTGCTTCACACTGCGGCCCGGCATGCGCGTGGGCTTTTGCTACCAGATCCGGCGTTG |
| | TACAGACGACGTGCGGCCCCAGGGTTGCTACCACGGCGCGGGGGAGCAGTACCGCGGC |
| | ACGGTCAGCAAGACCCGCAAGGGTGTCCAGTGCCAGCGCGCGTCCGCTGAGACGCCGC |
| | ACAAGCCGCAGTTTACCTTTACCTCCGAACCGCATGCACAACTGGAGGAGAACTTCTG |
| | CCGCGACCCAGATGGGGATAGCTATGGGCCCTGGTGCTACACGATGGACCCAAGGACC |
| | CCATTCGACTACTGTGCCCTGCGACGCTGCGCTGATGACCAGCCGCCATCAATCCTGG |
| | ACCCCCCCGACCAGGTGCACTTTGAGAAGTGTGGCAAGAGGGTGGATCGGCTGGATCA |
| | GCGTTGTTCCAAGCTGCGCGTGGCTGGGGGCCATCCGGGCAACTCACCCTGGACAGTC |
| | AGCTTGCGGAATAGGCAGGGCCAGCATTTCTGCGGGGGGTCTCTAGTGAAGGAGCAGT |
| | GGATACTGACTGCCCGGCAGTGCTTCTCCTCCAGCCATATGCCTCTCACGGGCTATGA |
| | GGTATGGTTGGGCACCCTGTTCCAGAACCCACAACATGGAGAGCCAGGCCTACAGCGG |
| | GTCCCAGTAGCCAAGATGCTGTGTGGGCCCTCAGGCTCTCAGCTTGTCCTGCTCAAGC |
| | TGGAGAGATCTGTGACCCTGAACCAGCGTGTGGCCCTGATCTGCCTGCCGCCTGAATG |
| | GTATGTGGTGCCTCCAGGGACCAAGTGTGAGATTGCAGGCCGGGGTGAGACCAAAGGT |
| | ACGGGTAATGACACAGTCCTAAATGTGGCCTTGCTGAATGTCATCTCCAACCAGGAGT |
| | GTAACATCAAGCACCGAGGACATGTGCGGGAGAGCGAGATGTGCACTGAGGGACTGTT |
| | GGCCCCTGTGGGGGCCTGTGAGGGGGGTGACTACGGGGGCCCACTTGCCTGCTTTACC |
| | CACAACTGCTGGGTCCTGGAAGGAATTAGAATCCCCAACCGAGTATGCGCAAGGTCGC |
| | GCTGGCCAGCCGTCTTCACACGTGTCTCTGTGTTTGTGGACTGGATTCACAAGGTCAT |
| | GAGACTGGGTTAGGCCCAGCCTTGACGCCATATGCTTTGGGGAGGACAAAACTT |
| | ORF Start: ATG at 21 ORF Stop: TAG at 2157 |
| | SEQ ID NO: 142 712 aa MW at 80097.8kD |
| NOV45a, | MGWLPLLLLLTQCLGVPGQRSPLNDFEVLRGTELQRLLQAVVPGPWQEDVADAEECAG |
| CG54479-01 | |
| Protein | RCGPLMDCRAFHYNVSSHGCQLLRWTQHSPHTRLRHSGRCDLFQEKDYIRTCIMNNGV |
| Sequence | |
| | GYRGTMATTVGGLSCQAWSHKFPNDHRYMPTLRNGLEENFCRNPDGDPGGPWCHTTDP |
| | AVRFQSCGIKSCRSAACVWCNGEEYRGAVDRTESGRECQRWDLQHPHQHPFEPGKYPD |
| | QGLDDNYCRNPDGSERPWCYTTDPQIEREFCDLPRCGSEAQPRQEATSVSCFRGKGEG |
| | YRGTANTTTAGVPCQRWDAQIPHQHRFTPEKYACKDLRENFCRNPDGSEAPWCFTLRP |
| | GMRVGFCYQTRRCTDDVRPQGCYHGAGEQYRGTVSKTRKGVQCQRASAETPHKPQFTF |
| | TSEPHAQLEENFCRDPDGDSYGPWCYTMDPRTPFDYCALRRCADDQPPSILDPPDQVQ |
| | FEKCGKRVDRLDQRCSKLRVAGGHPGNSPWTVSLRNRQGQHPCGGSLVKEQWILTARQ |
| | CFSSSHMPLTGYEVWLGTLFQNPQHGEPGLQRVPVAKMLCGPSGSQLVLLKLERSVTL |
| | NQRVALICLPPEWYVVPPGTKCETAGRGETKGTGNDTVLNVALLNVTSNQECNTKHRG |
| | HVRESEMCTEGLLAPVGACEGGDYGGPLACFTHNCWVLEGTRIPNRVCARSRWPAVFT |
| | RVSVPVDWTHKVMRLG |
| | SEQ ID NO: 143 1710 bp |
| NOV45b, | ATGACTTCCAGGTGCTCCGGGGCACAGAGCTACCTGCTACATGCGGTGGTGCCTGGGC |
| CG54479-02 | |
| DNA | CTTGGCAGGAGGATGTGGCAGATGCTGAAGAGTGTGCTGGTCGCTGTGGGCCCTTAAC |
| Sequence | |
| | GGACTGCTGGGCCTTCCACTACAATGTGAGCAGCCATGGTTGCCAACTGCTGCCATGG |
| | ACTCAACACTCGCCCCACTCAAGGCTGTGGCATTCTGGGCGCTGTGACCTCTTCCAGA |
| | AGAAAGACTACATACGGACCTGCATCATGAACAATGGGGTTGGGTACCGGGGCACCAT |
| | GGCCACGACCGTGGGTGGCCTGTCCTGCCAGGCTTGGAGCCACAAGTTCCCGAATGAT |
| | CACAAGTACATGCCCACGCTCCGGAATGGCCTGGAAGAGAACTTCTGCCATAACCCTG |
| | ATGGCGACCCCGGAGGTCCTTGGTGCCACACAACAGACCCTGCCGTGCGCTTCCAGAG |
| | CTGCGGCATCAAATCCTGCCGGGTGGCCGCGTGTGTCTGGTGCAATGGCGAGGAATAC |
| | CGCGGCGCGGTAGACCGCACCGAGTCAGGGCGCGAGTGCCAGCGCTGGGATCTTCAGC |
| | ACCCGCACCAGCACCCCTTCGAGCCGGGCAAGTACCTCGACCAAGGTCTGGACGACAA |
| | CTATTGCCGGAATCCTGACGGCTCCGAGCGGCCATGGTGCTACACTACGGATCCGCAG |
| | ATCGAGCGAGAATTCTGTGACCTCCCCCGCTGCGGTTCCGAGGCACAGCCCCGCCAAG |
| | AGGCCACAAGTGTCAGCTGCTTCCGCGGGAAGGGTGAGGGCTACCGGGGCACAGCCAA |
| | TACCACCACCGCGGGCGTACCTTGCCAGCGTTGGGACGCGCAAATCCCGCATCAGCAC |
| | CGATTTACGCCAGAAAAATACGCGTGCAAGGACCTTCGGGAGAACTTCTGCCGGAACC |
| | CCGACGGCTCAGAGGCGCCCTGGTGCTTCACACTGCGGCCCGGCATGCGCGTGGGCTT |
| | TTGCTACCAGATCCGGCGTTGTACAGACGACGTGCGGCCCCAGGACTGCTACCACGGC |
| | GCGGGGGAGCAGTACCGCGGCACGGTCAGCAAGACCCGCAAGGGTGTCCAGTGCCAGC |
| | GCGCGTCCGCTGAGACGCCGCACAAGCCGCAGTTCACGTTTACCTCCGAACCGCATGC |
| | ACAACTGGAGGAGAACTTCTGCCAGGACCCAGATGGGGATAGCCATGGGCCCTGGTGC |
| | TACACGATGGACCCAAGGACCCCATTCGACTACTGTGCCCTGCGACGCTGCGCTGATG |
| | ACCAGCCGCCATCAATCCTGGACCCCCCCACAGACCAGGTGCAGTTTGAGAAGTGTGG |
| | CAAGAGGGTGGATCGGCTGGATCAGCGTCGTTCCAAGCTGCGCGTGGCTGGGGGCCAT |
| | CCGGGCAACTCACCCTGGACAGTCAGCTTGGGGAATCGGAGGCAGGGCCAGCATTTCT |
| | GCGGGGGGTCTCTAGTGAAGGAGCAGTGGATACTGACTGCCCGGCAGTGCTTCTCCTC |
| | CCATATGCCTCTCACGGGCTATGAGGTATGGTTGGGCACCCTGTTCCAGAACCCACAA |
| | CATGGAGAGCCAGGCCTACAGCGGGTCCCAGTAGCCAAGATGCTGTGTGGGCCCTCAG |
| | GCTCCCAGCTTGTCCTGCTCAAGCTGGAGAGATCTGTGACCCTGAACCAGCGTGTGGC |
| | CCTGATCTGCCTGCCGCCTGAATGATAT |
| | ORF Start: ATG at 1 ORF Stop: TGA at 1705 |
| | SEQ ID NO: 144 568 aa MW at 64180.3kD |
| NOV45b, | MTSRCSGAQSYLLHAVVPGPWQEDVADAEFCAGRCGPLTDCWAPHYNVSSHGCQLLPW |
| CG54479-02 | |
| Protein | TQHSPHSRLWHSGRCDLFQKKDYTRTCIMNNGVGYRGTMATTVGGLSCQAWSHKFPND |
| Sequence | |
| | HKYMPTLRNGLEENFCHNPDGDRGGPWCHTTDRAVRFQ8CGIKSCRVAACVWCNGEEY |
| | RGAVDRTESGRECQRWDLQHPHQHPFEPGKYLDQGLDDNYCRNPDGSERPWCYTTDPQ |
| | IEREFCDLPRCGSEAQPRQEATSVSCFRGKGEGYRGTANTTTAGVPCQRWDAQIPHQH |
| | RFTPEKYACKDLRENFCRNPDGSEAPWCFTLRPGMRVGFCYQIRRCTDDVRPQDCYHG |
| | AGEQYRGTVSKTRKGVQCQRASAETPHKPQFTFTSEPHAQLEENFCQDPDGDSHGPWC |
| | YTMDPRTRFDYCALRRCADDQPPSILDPPTDQVQFEKCGKRVDRLDQRRSKLRVAGGH |
| | PGNSPWTVSLGNRRQGQHFCGGSLVKEQWILTARQCFSSHMPLTGYEVWLGTLFQNPQ |
| | HGEPGLQRVPVAKMLCGPSGSQLVLLKLERSVTLNQRVALICLPPE |
| | SEQ ID NO: 145 1011 bp |
| NOV45c, | AAGCTTTGCATCATGAACAATGGGGTTGGGTACCGGGGCACCATGGCCACGACCGTGG |
| CG54479-03 | |
| DNA | GTGGCCTGCCCTGCCAGGCTTGGAGCCACAAGTTCCCAAATGATCACAAGTACACGCC |
| Sequence | |
| | CACTCTCCGGAATGGCCTGGAAGAGAACTTCTGCCGTAACCCTGATGGCGACCCCGGA |
| | GGTCCTTGGTGCTACACAACAGACCCTGCTGTGCGCTTCCAGAGCTGCGGCATCGAAT |
| | CCTGCCGGGAGGCCGCGTGTGTCTGGTGCAATGGCGAGGAATACCGCGGCGCGGTAGA |
| | CCGCACGGAGTCAGGGCGCGAGTGCCAGCGCTGGGATCTTCAGCACCCGCACCAGCAC |
| | CCCTTCGAGCCGGGCAAGTTCCTCGACCAAGGTCTGGACGACAACTATTGCCGGAATC |
| | CTGACGGCTCCGAGCGGCCATGGTGCTACACTACGGATCCGCAGATCGAGCGAGAGTT |
| | CTGTGACCTCCCCCGCTGCGGGTCCGAGGCACAGCCCCGCCAAGAGGCCACAACTGTC |
| | AGCTGCTTCCGCGGGAAGGGTGAGGGCTACCGGGGCACAGCCAATACCACCACTGCCG |
| | GCGTACCTTGCCAGCGTTGGGACGCGCAPATCCCTCATCAGCACCGATTTACGCCAGA |
| | AAAATACGCGTGCAAAGACCTTCGGGAGAACTTCTGCCGGAACCCCGACGGCTCAGAG |
| | GCGCCCTGGTGCTTCACACTGCGGCCCGGCATGCGCGCGGCCTTTTGCTACCAGATCC |
| | GGCGTTGTACAGACGACGTGCGGCCCCAGGGGGAGCAGTACCGCGGCACGGTCAGCAA |
| | GACCCGCAAGGGTGTCCAGTGCCAGCGCTGGTCCGCTGAGACGCCGCACAAGCCGCAG |
| | TTCACGTTTACCTCCGAiCCGCATGCACAACTGGAGGAGAACTTCTGCCGGAACCCAG |
| | ATGGGGATAGCCATGGGCCCTGGTGCTACACGATGGACCCAAGGACCCCATTCGACTA |
| | CTGTGCCCTGCGACGCTGCCTCGAG |
| | ORF Start: at 7 ORF Stop: at 1006 |
| | SEQ ID NO: 146 333 aa MW at 38129.9kD |
| NOV45c, | CIMNNGVGYRGTMATTVGGLPCQAWSHKFPNDHKYTPTLRNGLEENFCRNPDGDPGGR |
| CG54479-03 | |
| Protein | WCYTTDPAVRFQSCGIESCREAACVWCNGEEYRGAVDRTESGRECQRWDLQHPHQHPF |
| Sequence | |
| | EPGKFLDQGLDDNYCRNPDGSERPWCYTTDPQIEREFCDLRRCGSEAQPRQEATTVSC |
| | FRGKGFGYRGTANTTTAGVPCQRWDAQIPHQHRFTPEKYACKDLRENFCRNPDGSEAP |
| | WCFTLRPGMRAAFCYQIRRCTDDVRRQGEQYRGTVSKTRKGVQCQRWSAETPHKPQFT |
| | FTSEPHAQLEENFCRNPDGDSHGPWCYTMDPRTPFDYCALRRC |
| | SEQ ID NO: 147 1881 bp |
| N0V45d, | ACACATTACTGACATGTATGCCCACCTGACCTGCACCCACTCATGCCCACTCTGCAGG |
| CG54479-04 | |
| DNA | GCAGCCCTCGCCATTGAATGACTTCCAGGTGCTCCGGGGCACAGAGCTACCTGCTACA |
| Sequence | |
| | TGCGGTGGTGCCTGGGCCTTGGCAGGAGGATGTGGCAGATGCTGAAGAGTGTGCTGGT |
| | CGCTGTGGGCCCTTAACGGACTGCTGGGCCTTCCACTACAATGTGAGCAGCCATGGTT |
| | GCCAACTGCTGCCATGGACTCAACACTCGCCCCACTCAAGGCTGTGGCATTCTGGGCG |
| | CTGTGACCTCTTCCAGAAGAAAGACTACATACGGACCTGCATCATGAACAATGGGGTT |
| | GGGTACCGGGGCACCATGGCCACGACCGTGGGTGGCCTGTCCTGCCAGGCTTGGAGCC |
| | ACAAGTTCCCGAATGATCACAAGTACATGCCCACGCTCCGGAATGGCCTGGAAGAGAA |
| | CTTCTGCCATAACCCTGATGGCGACCCCGGAGGTCCTTGGTGCCACACAACAGACCCT |
| | GCCGTGCGCTTCCAGAGCTGCGGCATCAAATCCTGCCGGGTGGCCGCGTGTGTCTGGT |
| | GCAATGGCGAGGAATACCGCGGCGCGGTAGACCGCACCGAGTCAGGGCGCGAGTGCCA |
| | GCGCTGGGATCTTCAGCACCCGCACCAGCACCCCTTCGAGCCGGGCAGGTTCCTCGAC |
| | CAAGGTCTGGACGACAACTATTGCCGGAATCCTGACGGCTCCGAGCGGCCATGGTGCT |
| | ACACTACGGATCCGCAGATCGAGCGAGAATTCTGTGACCTCCCCCGCTGCGGTTCCGA |
| | GGCACAGCCCCGCCAAGAGGCCACAAGTGTCAGCTGCTTCCGCGGGAAGGGTGAGGGC |
| | TACCGGGGCACAGCCAATACCACCACCGCGGGCGTACCTTGCCAGCGTTGGGACGCGC |
| | AAATCCCGCATCAGCACCGATTTACGCCAGAAAAATACGCGTGCAAGGACCTTCGGGA |
| | GAACTTCTGCCGGAACCTCGACGGCTCAGAGGCGCCCTGGTGCTTCACACTGCGGCCC |
| | GGCATGCGCGTGGGCTTTTGCTACCAGATCCGGCGTTGTACAGACGACGTGCGGCCCC |
| | AGGACTGCTACCACGGCGCGGGGGAGCAGTACCGCGGCACGGTCAGCAAGACCCGCAA |
| | GGGTGTCCAGTGCCAGCGCGCGTCCGCTGAGACGCCGCACAAGCCGCAGTTCACGTTT |
| | ACCTCCGAACCGCATGCACAACTGGAGGAGAACTTCTGCCAGACCCCAGATGGGGATA |
| | GCCATGGGCCCTGGTGCTACACGATGGACCCAAGGACCCCATTCGACTACTGTGCCCT |
| | GCGACGCTGCGCTGATGACCAGCCGCCATCAATCCTGGACCCCCCCGACCAGGTGCAG |
| | TTTGAGAAGTGTGGCAAGAGGGTGGATCGGCTGGATCAGCGTCGTTCCAAGCTGCGCG |
| | TGGCTGGGGGCCATCCGGGCAACTCACCCTGGACAGTCAGCTTGGGGAATCGGCAGGG |
| | CCAGCATTTCTGCGGGGGGTCTCTAGTGAAGGAGCAGTGGATACTGACTGCCCGGCAG |
| | TGCTTCTCCTCCCAGCATATGCCTCTCACGGGCTATGAGGTATGGTTGGGCACCCTGT |
| | TCCAGAACCCACAACATGGAGAGCCAGGCCTACAGCGGGTCCCAGTAGCCAAGATGCT |
| | GTGTGGGCCCTCAGGCTCCCAGCTTGTCCTGCTCAAGCTGGAGAGGTCTGTGACCCTG |
| | AACCAGCGTGTGGCCCTGATCTGCCTGCCGCCTGAATGATATGTGGTGCCTCCAGGGA |
| | CCAAGTGTGAGATTGCAGGCCGGGGTGAGACCAAAGGTAAGAGCATAGTGCACAGGAC |
| | TGCTGGTGGCCAGGAGGCCCAGCCC |
| | ORF Start: ATG at 76 ORF Stop: TGA at 1777 |
| | SEQ ID NO: 148 567 aa MW at 64065.2kD |
| NOV45d, | MTSRCSGAQSYLLHAVVPGPWQEDVADAEECAGRCGPLTDCWAFHYNVSSHGCQLLPW |
| CG54479-04 | |
| Protein | TQHSPHSRLWHSGRCDLFQKKDYIRTCIMNNGVGYRGTMATTVGGLSCQAWSHKFPND |
| Sequence | |
| | HKYMPTLRNGLEENFCHNPDGDPGGRWCHTTDPAVRFQSCGIKSCRVAACVWCNGEEY |
| | RGAVDRTESGRECQRWDLQHPHQHPFEPGRFLDQGLDDNYCRNPDGSERPWCYTTDPQ |
| | IEREFCDLPRCGSEAQPRQEATSVSCFRGKGEGYRGTANTTTAGVPCQRWDAQIPHQH |
| | RFTPEKYACKDLRENFCRNLDGSEAPWCFTLRPGMRVGFCYQIRRCTDDVRPQDCYHG |
| | AGEQYRGTVSKTRKGVQCQRASAETPHKPQFTFTSEPHAQLEENFCQTPDGDSHGPWC |
| | YTMDPRTPPDYCALRRCADDQPPSILDPPDQVQFEKCGKRVDRLDQRRSKLRVAGGHP |
| | GNSPWTVSLGNRQGQHFCGGSLVKEQWILTARQCFSSQHMPLTGYEVWLGTLFQNPQH |
| | GEPGLQRVRVAKMLCGPSGSQLVLLKLERSVTLNQRVALICLPPE |
| | SEQ ID NO: 149 1698 bp |
| NOV45e. | ATGACTTCTAGGTGCTCCGGGGCACAGAGCTACCTACAAGCGGTGGTGCCCGGGCCTT |
| CG54479-03 | |
| DNA | GGCAGGAGGATGTGGCAGATGCTGAAGAGTGTGCTGGTCGCTGTGGGCCCTTAATGGA |
| Sequence | |
| | CTGCGCGTTCCACTACAATGTGAGCAGCCATGGTTGCCAACTGCTGCCATGGACTCAA |
| | CACTCACCCCACACGAGGCTGCGGCATTCTGGGCGCTGTGACCTCTTCCAGGAGAAAG |
| | ACTACATACGGACCTGCATCATGAACAATGGGGTTGGGTACCGGGGCACCATGGCCAC |
| | GACCGTGGGTGGCCTGTCCTGCCAGGCTTGGAGCCACAAGTTCCCGAACGATCACCAG |
| | TACATGCCCACGCTCCGGAATGGCCTGGAAGAGAACTTCTGCCGTAACCCTGATGGCG |
| | ACCCCGGAGGTCCTTGGTGCCACACAACAGACCCTGCCGTGCGCTTCCAGAGCTGCGG |
| | CATCAAATCCTGCCGGGTGGCCGCGTGTGTCTGGTGCAATGGCGAGGAATACCGCGGC |
| | GCGGTAGACCGCACCGAGTCAGGGCGCGAGTGCCAGCGCTGGGATCTTCAGCACCCGC |
| | ACCAGCACCCCTTCGAGCCGGGCAAGTTCCTCGACCAAGGTCTGGACGACAACTATTG |
| | CCGGAATCCTGACGGCTCCGAGCGGCCATGGTGCTACACTACCGATCCGCAGATCGAG |
| | CGAGAATTCTGTGACCTCCCCCGCTGCGGTTCCGAGGCACAGCCCCGCCAAGAGGCCA |
| | CAAGTGTCAGCTGCTTCCGCGGGAAGGGTGAGGGCTACCGGGGCACAGCCAATACCAC |
| | CACCGCGGGCGTACCTTGCCAGCGTTGGGACGCGCAAATCCCGCATCAGCACCGATTT |
| | ACGCCAGAAAAATACGCGTGCAAGGACCTTCGGGAGAACTTCTGCCGGAACCCCGACG |
| | GCTCAGAGGCGCCCTGGTGCTTCACACTGCGGCCCGGCATGCGCGTGGGCTTTTGCTA |
| | CCAGATCCGGCGTTGTACAGACGACGTGCGGCCCCAGGACTGCTACCACGGCGCGGGG |
| | GAGCAGTACCGCGGCACGGTCAGCAAGACCCGCAAGGGTGTCCAGTGCCAGCGCGGGT |
| | CCGCTGAGACGCCGCACAAGCCGCAGTTCACGTTTACCTCCGAACCGCATGCACAACT |
| | GGAGGAGAACTTCTGCCAGGACCCAGATGGGGATAGCCATGGGCCCTGGTGCTACACG |
| | ATGGACCCAAGGACCCCATTCGACTACTGTGCCCTGCGACGCTGCGCTGATGACCAGC |
| | CGCCATCAATCCTGGACCCCCCCGACCAGGTGCAGTTTGAGAAGTGTGGCAAGAGGGT |
| | GGATCGGCTGGATCAGCGTTGTTCCAAGCTGCGCGTGGCTGGGGGCCATCCGGGCAAC |
| | TCACCCTGGACAGTCAGCTTGCGGAATAGGCAGGGCCAGCATTTCTGCGGGGGGTCTC |
| | TAGTGAAGGAGCAGTGGATACTGACTGCCCGGCAGTGCTTCTCCTCCAGCCATATGCC |
| | TCTCACGGGCTATGAGGTATGGTTGGGCACCCTGTTCCAGAACCCACAACATGGAGAG |
| | CCAGGCCTACAGCGGGTCCCAGTAGCCAAGATGCTGTGTGGGCCCTCAGGCTCTCAGC |
| | TTGTCCTGCTCAAGCTGGAGAGGTCTGTCACCCTGAACCAGCGTGTGGCCCTGATCTG |
| | CCTGCCGCCTGAATGA |
| | ORF Start: ATG at 1 ORF Stop: TGA at 1696 |
| | SEQ ID NO: 150 565 aa MW at 63751.8kD |
| NOV45e, | MTSRCSGAQSYLQAVVPGPWQEDVADAEECAGRCGPLMDCAFHYNVSSHGCQLLPWTQ |
| CG54479-05 | |
| Protein | HSPHTRLRHSGRCDLFQEKDYIRTCIMNNGVGYRGTMATTVGGLSCQAWSHKFPNDHQ |
| Sequence | |
| | YMPTLRNGLEENFCRNPDGDPGGPWCHTTDPAVRFQSCGIKSCRVAACVWCNGEEYRG |
| | AVDRTESGRECQRWDLQHPHQHPFEPGKFLDQGLDDNYCRNRDGSERPWCYTTDPQIE |
| | REFCDLRRCGSEAQPRQEATSVSCFRGKGEGYRGTANTTTAGVPCQRWDAQIPHQHRF |
| | TPEKYACKDLRENFCRNPDGSEAPWCFTLRPGMRVGFCYQIRRCTDDVRPQDCYHGAG |
| | EQYRGTVSKTRKGVQCQRGSAETPHKRQFTFTSEPHAQLEENFCQDPDGDSHGPWCYT |
| | MDRRTPFDYCALRRCADDQPPSILDPPDQVQPEKCGKRVDRLDQRCSKLRVAGGHPGN |
| | SPWTVSLRNRQGQHFCGGSLVKEQWILTARQCFSSSHMPLTGYEVWLGTLFQNPQHGE |
| | PGLQRVPVAKMLCGPSGSQLVLLKLERSVTLNQRVALICLPPE |
| | SEQ ID NO: 151 2066 bP |
| NOV45f, | ACAGGTTTCACAACTTCCCGGATGGGGCTGTGGTGGGTCACAGTGCAGCCTCCAGCCA |
| CG54479-06 | |
| DNA | GAAGGATGGGGTGGCTCCCACTCCTGCTGCTTCTGACTCAATGCTTAGGGGTCCCTGG |
| Sequence | |
| | GCAGCGCTCGCCATTGAATGACTTCCAAGTGCTCCGGGGCACAGAGCTACAGCACCTG |
| | CTACATGCGGTGGTGCCCGGGCCTTGGCAGGAGGATGTGGCAGATGCTGAAGAGTGTG |
| | CTGGTCGCTGTGGGCCCTTAATGGACTGCCGGGCCTTCCACTACAACGTGAGCAGCCA |
| | TGGTTGCCAACTGCTGCCATGGACTCAACACTCGCCCCACACGAGGCTGCGGCGTTCT |
| | GGGCGCTGTGACCTCTTCCAGAAGAAAGACTACGTACGGACCTGCATCATGAACAATG |
| | GGGTTGGGTACCGGGGCACCATGGCCACGACCGTGGGTGGCCTGCCCTGCCAGGCTTG |
| | GAGCCACAAGTTCCCGAATGATCACAAGTACACGCCCACTCTCCGGAATGGCCTGGAA |
| | GAGAACTTCTGCCGTAACCCTGATGGCGACCCCGGAGGTCCTTGGTGCTACACAACAG |
| | ACCCTGCTGTGCGCTTCCAGAGCTGCGGCATCAAATCCTGCCGGGAGGCCGCGTGTGT |
| | CTGGTGCAATGGCGAGGAATACCGCGGCGCGGTAGACCGCACGGAGTCAGGGCGCGAG |
| | TGCCAGCGCTGGGATCTTCAGCACCCGCACCAGCACCCCTTCGAGCCGGGCAAGTTCC |
| | TCGACCAAGGTCTGGACGACAACTATTGCCGGAATCCTGACGGCTCCGAGCGGCCATG |
| | GTGCTACACTACGGATCCGCAGATCGAGCGAGAGTTCTGTGACCTCCCCCGCTGCGGG |
| | TCCGAGGCACAGCCCCGCCAAGAGGCCACAACTGTCAGCTGCTTCCGCGGGAAGGGTG |
| | AGGGCTACCGGGGCACAGCCAATACCACCACTGCGGGCGTACCTTGCCAGCGTTGGGA |
| | CGCGCAAATCCCTCATCAGCACCGATTTACGCCAGAAAAATACGCGTGCAAAGACCTT |
| | CGGGAGAACTTCTGCCGGAACCCCGACGGCTCAGAGGCGCCCTGGTGCTTCACACTGC |
| | GGCCCGGCATGCGCGCGGCCTTTTGCTACCAGATCCGGCGTTGTACAGACGACGTGCG |
| | GCCCCAGGACTGCTACCACGGCGCAGGGGAGCAGTACCGCGGCACGGTCAGCAAGACC |
| | CGCAAGGGTGTCCAGTGCCAGCGCTGGTCCGCTGAGACGCCGCACAAGCCGCAGTTCA |
| | CGTTTACCTCCGAACCGCATGCACAACTGGAGGAGAACTTCTGCCGGAACCCAGATGG |
| | GGATAGCCATGGGCCCTGGTGCTACACGATGGACCCAAGGACCCCATTCGACTACTGT |
| | GCCCTGCGACGCTGCGCTGATGACCAGCCGCCATCAATCCTGGACCCCCCAGACCAGG |
| | TGCAGTTTGAGAAGTGTGGCAAGAGGGTGGATCGGCTGGATCAGCGGCGTTCCAAGCT |
| | GCGCGTGGTTGGGGGCCATCCGGGCAACTCACCCTGGACAGTCAGCTTGCGGAATCGG |
| | CAGGGCCAGCATTTCTGCGGGGGGTCTCTAGTGAAGGAGCAGTGGATACTGACTGCCC |
| | GGCAGTGCTTCTCCTCCTGCCATATGCCTCTCACGGGCTATGAGGTATGGTTGGGCAC |
| | CCTGTTCCAGAACCCACAGCATGGAGAGCCAAGCCTACAGCGGGTCCCAGTAGCCAAG |
| | ATGGTGTGTGGGCCCTCAGGCTCCCAGCTTGTCCTGCTCAAGCTGGAGAGATCTGTGA |
| | CCCTGAACCAGCGTGTGGCCCTGATCTGCCTGCCCCCTGAATGGTATGTGGTGCCTCC |
| | AGGGACCAAGTGTGAGGGTGACTACGGGGGCCCACTTGCCTGCTTTACCCACAACTGC |
| | TGGGTCCTGGAAGGAATTATAATCCCCAACCGAGTATGCGCAAGGTCCCGCTGGCCAG |
| | CTGTCTTCACGCGTGTCTCTGTGTTTGTGGACTGGATTCACAAGGTCATGAGACTGGG |
| | TTAGGCCCAGCCTTGATGCCATATGCCTTGGGGAGG |
| | ORF Start: ATG at 22 ORF Stop: TAG at 2032 |
| | SEQ ID NO: 152 670 aa MW at 76160.6kD |
| NOV45f, | MGLWWVTVQPPARRMGWLPLLLLLTQCLGVPGQRSPLNDFQVLRGTELQHLLHAVVPG |
| CG54479-06 | |
| Protein | PWQEDVADAEECAGRCGPLMDCRAFHYNVSSHGCQLLPWTQHSPHTRLRRSGRCDLFQ |
| Sequence | |
| | KKDYVRTCIMNNGVGYRGTMATTVGGLPCQAWSHKFPNDHKYTPTLRNGLEENPCRNP |
| | DGDPGGPWCYTTDPAVRFQSCGIKSCREAACVVCNGEEYRGAVDRTESGRECQRWDLQ |
| | HPHQHPFEPGKFLDQGLDDNYCRNPDGSERPWCYTTDPQIEREFCDLPRCGSEAQPRQ |
| | EATTVSCFRGKGEGYRGTANTTTAGVPCQRWDAQIPHQHRFTPEKYACKDLRENFCRN |
| | PDGSEAPWCFTLRPGMRAAFCYQIRRCTDDVRPQDCYHGAGEQYRGTVSKTRKGVQCQ |
| | RWSAETPHKPQETFTSEPHAQLEENFCRNPDGDSHGPWCYTMDPRTPFDYCALRRCAD |
| | DQPPSTLDPPDQVQFEKCGKRVDRLDQRRSKLRVVGGHPGNSPWTVSLRNRQGQHFCG |
| | GSLVKEQWILTARQCFSSCHMPLTGYEVWLGTLFQNPQHGEPSLQRVPVAKMVCGPSG |
| | SQLVLLKLERSVTLNQRVALICLPPEWYVVPPGTKCEGDYGGPLACFTHNCWVLEGII |
| | IPNRVCARSRWPAVFTRVSVFVDWIHKVMRLG |

[0559] Sequence comparison of the above protein sequences yields the following sequence relationships shown in Table 45B.

TABLE 45B
Comparison of NOV45a against NOV45b through NOV45f

| | | Identities/ |
|---|---|---|
| Protein | NOV45a Residues/ | Similarities for |
| Sequence | Match Residues | the Matched Region |
| NOV45b | 37 . . . 592 | 540/558 (96%) |
| | 12 . . . 568 | 545/558 (96%) |
| NOV45c | 110 . . . 448 | 319/339 (94%) |
| | 1 . . . 333 | 326/339 (96%) |
| NOV45d | 37 . . . 592 | 536/556 (96%) |
| | 12 . . . 567 | 543/556 (97%) |
| NOV45e | 35 . . . 592 | 547/558 (98%) |
| | 9 . . . 565 | 551/558 (98%) |
| NOV45f | 1 . . . 712 | 605/712 (84%) |
| | 15 . . . 670 | 619/712 (85%) |

[0560] Further analysis of the NOV45a protein yielded the following, properties shown in Table 45C.

TABLE 45C
Protein Sequence Properties NOV45a

| | |
|---|---|
| PSort | 0.4202 probability located in lysosome (lumen); 0.3700 |
| analysis: | probability located in outside; 0.1270 probability located |
| | in microbody (peroxisome); 0.1000 probability located in |
| | endoplasmic reticulum (membrane) |
| SignalP | Cleavage site between residues 19 and 20 |
| analysis: | |

[0561] A search of the NOV45a protein against the Geneseq database a proprietary database that contains sequences published in patents and patent publication, yielded several homologous proteins shown in Table 45D.

TABLE 45D
Geneseq Results for NOV45a

| | | NOV45a | | |
|---|---|---|---|---|
| | Protein/Organism/ | Residues/ | Identities/ | |
| Geneseq | Length [Patent #, | Match | Similarities for | Expect |
| Identifier | Date] | Residues | the Matched Region | Value |
| AAE16349 | Human MSP precursor-like protein, | 1 . . . 712 | 712/712 (100%) | 0.0 |
| | POLY13-Homo sapiens, 712 aa. | 1 . . . 712 | 712/712 (100%) | |
| | [WO200185767-A2, 15 Nov. 2001] | | | |
| AAW14270 | Human growth factor L5/3-Homo | 1 . . . 712 | 683/712 (95%) | 0.0 |
| | sapiens, 711 aa. [U.S. Pat. No. 5606029-A, | 1 . . . 711 | 693/712 (96%) | |
| | 25 Feb. 1997] | | | |
| AAR66602 | Human L5/3 tumour suppressor | 1 . . . 712 | 683/712 (95%) | 0.0 |
| | protein-Homo sapiens, 711 aa. | 1 . . . 711 | 693/712 (96%) | |
| | [U.S. Pat. No. 5315000-A, 24 May 1994] | | | |
| AAY31157 | Human macrophage stimulating | 1 . . . 712 | 682/712 (95%) | 0.0 |
| | protein-Homo sapiens, 711 aa. | 1 . . . 711 | 692/712 (96%) | |
| | [U.S. Pat. No. 5948892-A, 7 Sep. 1999] | | | |
| AAW82789 | Human MSP protein-Homo sapiens, | 1 . . . 712 | 682/712 (95%) | 0.0 |
| | 711 aa. [WO9855141-A1, | 1 . . . 711 | 692/712 (96%) | |
| | 10 Dec. 1998] | | | |

[0562] In a BLAST search of public sequence datbases, the NOV45a protein was found to have homology to the proteins shown in the BLASTP data in Table 45E.

TABLE 45E
Public BLASTP Results for NOV45a

| | | NOV45a | | |
|---|---|---|---|---|
| Protein | | Residues/ | Identities/ | |
| Accession | | Match | Similarities for | Expect |
| Number | Protein/Organism/Length | Residues | the Matched Portion | Value |
| P26927 | Hepatocyte growth factor-like protein | 1 . . . 712 | 682/712 (95%) | 0.0 |
| | precursor (Macrophage stimulatory | 1 . . . 711 | 692/712 (96%) | |
| | protein) (MSP) (Macrophage stimulating | | | |
| | protein)-Homo sapiens (Human), 711 aa. | | | |
| A40332 | macrophage-stimulating protein 1 | 1 . . . 711 | 555/720 (77%) | 0.0 |
| | precursor-mouse, 716 aa. | 1 . . . 715 | 621/720 (86%) | |
| P70521 | Macrophage stimulating protein precursor- | 1 . . . 711 | 556/720 (77%) | 0.0 |
| | Rattus norvegicus (Rat), 716 aa. | 1 . . . 715 | 616/720 (85%) | |
| P26928 | Hepatocyte growth factor-like protein | 1 . . . 711 | 554/720 (76%) | 0.0 |
| | precursor (Macrophage stimulatory | 1 . . . 715 | 620/720 (85%) | |
| | 716 aa. | | | |
| Q91XG8 | Hepatocyte growth factor-like-Mus | 1 . . . 711 | 552/720 (76%) | 0.0 |
| | musculus (Mouse), 716 aa. | 1 . . . 715 | 619/720 (85%) | |

[0563] PFam analysis predicts that the NOV45a protein contains the domains shown in the Table 45F.

TABLE 45F
Domain Analysis of NOV45a

| | NOV45a | Identities/Similarities | Expect |
|---|---|---|---|
| Pfam Domain | Match Region | for the Matched Region | Value |
| PAN | 18 . . . 106 | 23/110 (21%) | 3.6e−15 |
| | | 67/110 (61%) | |
| kringle | 110 . . . 186 | 41/85 (48%) | 1.3e−42 |
| | | 69/85 (81%) | |
| kringle | 191 . . . 268 | 48/85 (56%) | 1.7e−48 |
| | | 74/85 (87%) | |
| kringle | 283 . . . 361 | 44/85 (52%) | 1.9e−49 |
| | | 74/85 (87%) | |
| kringle | 370 . . . 448 | 42/85 (49%) | 4.3e−42 |
| | | 73/85 (86%) | |
| trypsin | 484 . . . 705 | 87/263 (33%) | 1e−45 |
| | | 160/263 (61%) | |

### Example 46

[0564] The NOV46 clone was analyzed, and the nucleotide and encoded polypeptide sequences are shown in Table 46A.

TABLE 46A
NOV46 Sequence Analysis

| | |
|---|---|
| | SEQ ID NO: 153 2412 bp |
| NOV46a, | ATGGGAAGCCAGTAACACTGTGGCCTACTATCTCTTCCGTGGTGCCATCTACATTTTT |
| CG56649-01 | |
| DNA | GGGACTCGGGAATTATGAGGTAGAGGTGGAGGCGGAGCCGGATGTCAGAGGTCCTGAA |
| Sequence | |
| | ATAGTCACCATGGGGGAAAATGATCCGCCTGCTGTTGAAGCCCCCTTCTCATTCCGAT |
| | CGCTTTTTGGCCTTGATGATTTGAAAATAAGTCCTCTTGCACCAGATGCAGATGCTGT |
| | TGCTGCACAGATCCTGTCACTGCTGCCATTGAAGTTTTTTCCAATCATCGTCATTGGG |
| | ATCATTGCATTGATATTAGCACTGGCCATTGGTCTGGGCATCCACTTCGACTGCTCAG |
| | GGAAGTACAGATGTCGCTCATCCTTTAAGTGTATCGAGCTGATAGCTCGATGTGACGG |
| | AGTCTCGGATTGCAAAGACGGGGAGGACGAGTACCGCTGTGTCCGGGTGGGTGGTCAG |
| | AATGCCGTGCTCCAGGTGTTCACAGCTGCTTCGTGGAAGACCATGTGCTCCGATGACT |
| | GGAAGGGTCACTACGCAAATGTTGCCTGTGCCCAACTGGGTTTCCCAAGCTATGTGAG |
| | TTCAGATAACCTCAGAGTGAGCTCGCTGGAGGGGCAGTTCCGGGAGGAGTTTGTGTCC |
| | ATCGATCACCTCTTGCCAGATGACAAGGTGACTGCATTACACCACTCAGTATATGTGA |
| | GGGAGGGATGTGCCTCTGGCCACGTGGTTACCTTGCAGTGCACAGCCTGTGGTCATAG |
| | AAGGGGCTACAGCTCACGCATCGTGGGTGGAAACATGTCCTTGCTCTCGCAGTGGCCC |
| | TGGCAGGCCAGCCTTCAGTTCCAGGGCTACCACCTGTGCGGGGGCTCTGTCATCACGC |
| | CCCTGTGGATCATCACTGCTGCACACTGTGTTTATGACTTGTACCTCCCCAAGTCATG |
| | GACCATCCAGGTGGGTCTAGTTTCCCTGTTGGACAATCCAGCCCCATCCCACTTGGTG |
| | GAGAAGATTGTCTACCACAGCAAGTACAAGCCAAAGAGGCTGCGCAATGACATCGCCC |
| | TTATGAAGCTGGCCGGGCCACTCACGTTCAATGAAATGATCCAGCCTGTGTGCCTGCC |
| | CAACTCTGAAGAGAACTTCCCCGATGGAAAAGTGTGCTGGACGTCAGGATGGGGGGCC |
| | ACAGAGGATGGAGGTGACCCCTCCCCTGTCCTGAACCACGCGGCCGTCCCTTTGATTT |
| | CCAACAAGATCTGCAACCACAGGGACGTGTACCGTGGCATCATCTCCCCCTCCATGCT |
| | CTGCGCGGGCTACCTGACGGGTGGCGTGGACAGCTGCCAGGGGGACAGCGGGGGGCCC |
| | CTGGTGTGTCAACAGAGGAGGCTGTGGAAGTTAGTGGGAGCGACCAGCTTTGGCATCG |
| | GCTGCGCAGAGGTGAACAAGCCTGGGGTGTACACCCGTGTCACCTCCTTCCTGGACTG |
| | GATCCACGAGCAGATGGAGAGAGACCTAAAAACCTGAAGAGGAAGGGGACAAGTAGCC |
| | ACCTGAGTTCCTGAGGTGATGAAGACAGCCCGATCCTCCCCTGGACTCCCGTGTAGGA |
| | ACCTGCACACGAGCAGACACCCTTGGAGCTCTGAGTTCCGGCACCAGTAGCAGGCCCG |
| | AAAGAGGCACCCTTCCATCTGATTCCAGCACAACCTTCAAGCTGCTTTTTGTTTTTTG |
| | TTTTTTTGAGGTGGAGTCTCGCTCTGTTGCCCAGGCTGGAGTGCAGTGGCGAAATCCC |
| | TGCTCACTGCAGCCTCCGCTTCCCTGGTTCAAGCGATTCTCTTGCCTCAGCTTCCCCA |
| | GTAGCTGGGACCACAGGTGCCCGCCACCACACCCAACTAATTTTTGTATTTTTAGTAG |
| | AGACAGGGTTTCACCATGTTGGCCAGGCTGCTCTCAAACCCCTGACCTCAAATGATGT |
| | GCCTGCTTCAGCCTCCCACAGTGCTGGGATTACAGGCATGGGCCACCACGCCTAGCCT |
| | CACGCTCCTTTCTGATCTTCACTAAGAACAAAAGAAGCAGCAACTTGCAAGGGCGGCC |
| | TTTCCCACTGGTCCATCTGGTTTTCTCTCCAGGGTCTTGCAAAATTCCTGACGAGATA |
| | AGCAGTTATGTGACCTCACGTGCAAAGCCACCAACAGCCACTCAGAAAAGACGCACCA |
| | GCCCAGAAGTGCAGAACTGCAGTCACTGCACGTTTTCATCTCTAGGGACCAGAACCAA |
| | ACCCACCCTTTCTACTTCCAAGACTTATTTTCACATGTGGGGAGGTTAATCTAGGAAT |
| | GACTCGTTTAAGGCCTATTTTCATGATTTCTTTGTAGCATTTGGTGCTTGACGTATTA |
| | TTGTCCTTTGATTCCAAATAATATGTTTCCTTCCCTCATTGTCTGGCGTGTCTGCGTG |
| | GACTGGTGACGTGAATCAAAATCATCCACTGAAA |
| | ORF Start: ATG at 126 ORF Stop: TGA at 1485 |
| | SEQ ID NO: 154 453 aa MW at 49333.0kD |
| NOV46a. | MGFNDPPAVEAPFSFRSLFGLDDLKISPVAPDADAVAAQILSLLPLKFFPIIVIGIIA |
| CG56649-01 | |
| Protein | LILALAIGLGIHFDCSGKYRCRSSFKCIELIARCDGVSDCKDGEDEYRCVRVGGQNAV |
| Sequence | |
| | LQVFTAASWKTMCSDDWKGHYANVACAQLGFPSYVSSDNLRVSSLEGQFREEFVSIDH |
| | LLPDDKVTALHHSVYVREGCASGHVVTLQCTACGHRRGYSSRIVGGNMSLLSQWPWQA |
| | SLQFQGYHLCGGSVITPLWIITAAHCVYDLYLPKSWTIQVGLVSLLDNPAPSHLVEKI |
| | VYHSKYKRKRLGNDIALMKLAGPLTFNEMIQPVCLPNSEENFRDGKVCWTSGWGATED |
| | GGDASRVLNHAAVPLISNKICNHRDVYGGIISPSMLCAGYLTGGVDSCQGDSGGRLVC |
| | QERRLWKLVGATSFGIGCAEVNKPGVYTRVTSPLDWIHEQMERDLKT |
| | SEQ ID NO: 155 1167 bp |
| NOV46b, | GGTACCATCCACTTCGACTGCTCAGGGAAGTACAGATGTCGCTCATCCTTTAAGTGTA |
| 169427553 | |
| DNA | TCGAGCTGATAGCTCGATGTGACGGAGTCTCGGATTGCAAAGACGGGGAGGACGAGTA |
| Sequence | |
| | CCGCTGTGTCCGGGTGAGTGGTCAGAATGCCGTGCTCCAGGTGTTCACAGCTGCTTCG |
| | TGGAAGACCATGTGCTCCGATGACTGGAAGGGTCACTACGCAAATGTTGCCTGTGCCC |
| | AACTGGGTTTCCCAAGCTATGTGAGTTCAGATAACCTCAGAGTGAGCTCGCTGGAGGG |
| | GCAGTTCCGGGAGGAGTTTGTGTCCATCGATCACCTCTTGCCAGATGACAAGGTGACT |
| | GCATTACACCACTCAGTATATGTGAGGGAGGGATGTGCCTCTGGCCACGTGGTTACCT |
| | TGCAGTGCACAGCCTGTGGTCATAGAAGGGGCTACAGCTCACGCATCGTGGGTGGAAA |
| | CATGTCCTTGCTCTCGCAGTGGCCCTGGCAGGCCAGCCTTCAGTTCCAGGGCTACCAC |
| | CTGTGCGGGGGCTCTGTCATCACGCCCCTGTGGATCATCACTGCTGCACACTGTGTTT |
| | ATGATTTGTACCTCCCCAAGTCATGGACCATCCAGGTGGGTCTAGTTTCCCTGTTGGA |
| | CAATCCAGCCCCATCCCACTTGGTGGAGAAGATTGTCTACCACAGCAAGTACAAGCCA |
| | AAGAGGCTGGGCAATGACATCGCCCTTATGAAGCTGGCCGGGCCACTCACGTTCAATG |
| | AAATGATCCAGCCTGTGTGCCTGCCCAACTCTGAAGAGAACTTCCCCGATGGAAAAGT |
| | GTGCTGGACGTCAGGATGGGGGGCCACAGAGGATGGAGGTGACGCCTCCCCTGTCCTG |
| | AACCACGCGGCCGTCCCTTTGATTTCCAACAAGATCTGCAACCACAGGGACGTGTACG |
| | GTGGCATCATCTCCCCCTCCATGCTCTGCGCGGGCTACCTGACGGGTGGCGTGGACAG |
| | CTGCCAGGGGGACAGCGGGGGGCCCCTGGTGTGTCAAGAGAGGAGGCTGTGGAAGTTA |
| | GTGGGAGCGACCAGCTTTGGCATCGGCTGCGCAGAGGTGAACAAGCCTGGGGTGTACA |
| | CCCGTGTCACCTCCTTCCTGGACTGGATCCACGAGCAGATGGAGAGAGACCTAAAAAC |
| | CCTCGAG |
| | ORF Start: at 1 ORF Stop: end of sequence |
| | SEQ ID NO: 156 389 aa MW at 42724.2kD |
| NOV46b, | GTIHFDCSGKYRCRSSFKCIELIARCDGVSDCKDGEDEYRCVRVSGQNAVLQVFTAAS |
| 169427553 | |
| Protein | WKTMCSDDWKGHYANVACAQLGFPSYVSSDNLRVSSLEGQFREEFVSIDHLLPDDKVT |
| Sequence | |
| | ALHHSVYVREGCASGHvVTLQCTACGHRRGYSSRIVGGNMSLLSQWPWQASLQFQGYH |
| | LCGGSVITPLWIITAAHCVYDLYLPKSWTIQVGLVSLLDNPAPSHLVEKIVYHSKYKP |
| | KRLGNDIALMKLAGPLTFNEMIQPVCLPNSEENFPDGKVCWTSGWGATEDGGDASPVL |
| | NHAAVPLISNKICNHRDVYGGIISPSMLCAGYLTGGVDSCQGDSGGPLVCQERRLWKL |
| | VGATSFGIGCAEVNKPGVYTRVTSFLDWIHEQMERDLKTLE |

[0565] Sequence comparison of the above protein sequences yields the following sequence relationships shown in Table 46B.

TABLE 46B
Comparison of NOV46a against NOV46b

| | NOV46a Residues/ | Identities/Similiarities |
|---|---|---|
| Protein Sequence | Match Residues | for the Matched Region |
| NOV46b | 69 . . . 453 | 384/385 (99%) |
| | 3 . . . 387 | 384/385 (99%) |

[0566] Further analysis of the NOV46a protein yielded the following properties shown in Table 46C.

TABLE 46C
Protein Sequence Properties NOV46a

| | |
|---|---|
| PSort | 0.6000 probability located in endoplasmic reticulum |
| analysis: | (membrane); 0.4413 probability located in microbody |
| | (peroxisome); 0.1000 probability located in mitochondrial |
| | inner membrane; 0.1000 probability located in plasma |
| | membrane |
| SignalP | Cleavage site between residues 69 and 70 |
| analysis: | |

[0567] A search of the NOV46a protein against the Geneseq database, a proprietary database that contains sequences published in patents and patent publication, yielded several homologous proteins shown in Table 46D.

TABLE 46D
Geneseq Results for NOV46a

| | Protein/ | NOV46a | Identities/ | |
|---|---|---|---|---|
| Geneseq | Organism/Length | Match | Matched | Expect |
| Identifier | [Patent #, Date] | Residues | Region | Value |
| AAE06935 | Human membrane- | 1 . . . 453 | 453/453 | 0.0 |
| | type serine | 1 . . . 453 | (100%) | |
| | protease (MTSP)6 - | | 453/453 | |
| | Homo sapiens, 453 aa. | | (100%) | |
| | [WO200157194-A2, | | | |
| | 09 AUG. 2001] | | | |
| AAU29055 | Human PRO polypeptide | 1 . . . 453 | 453/453 | 0.0 |
| | sequence #32 - Homo | 1 . . . 453 | (100%) | |
| | sapiens, 453 aa. | | 453/453 | |
| | [WO200168848-A2, | | (100%) | |
| | 20 SEP. 2001] | | | |
| AAB44250 | Human PRO382 | 1 . . . 453 | 452/453 | 0.0 |
| | (UNQ323) protein | 1 . . . 453 | (99%) | |
| | sequence SEQ ID | | 453/453 | |
| | NO: 69 - Homo | | (99%) | |
| | sapiens, 453 aa. | | | |
| | [WO200053756-A2, | | | |
| | 14 SEP. 2000] | | | |
| AAU82745 | Amino acid sequence of | 1 . . . 453 | 453/454 | 0.0 |
| | novel human protease | 1 . . . 454 | (99%) | |
| | #44 - Homo sapiens, | | 453/454 | |
| | 454 aa. | | (99%) | |
| | [WO200200860-A2, | | | |
| | 03 JAN. 2002] | | | |
| AAY41694 | Human PRO382 protein | 1 . . . 453 | 452/453 | 0.0 |
| | sequence - Homo | 1 . . . 452 | (99%) | |
| | sapiens, 452 aa. | | 452/453 | |
| | [WO9946281-A2, | | (99%) | |
| | 16 SEP. 1999] | | | |

[0568] In a BLAST search of public sequence datbases, the NOV46a protein was found to have homology to the proteins shown in the BLASTP data in Table 46E.

TABLE 46E
Public BLASTP Results for NOV46a

| | | | Identities/ | |
|---|---|---|---|---|
| | | | Similari- | |
| | | NOV46a | ties | |
| Protein | | Residues/ | for the | |
| Accession | Protein/ | Match | Matched | Expect |
| Number | Organism/Length | Residues | Portion | Value |
| CAC60382 | Sequence 11 from | 1 . . . 453 | 453/453 | 0.0 |
| | Patent WO0157194 - | 1 . . . 453 | (100%) | |
| | Homo sapiens | | 453/453 | |
| | (Human), 453 aa. | | (100%) | |
| P57727 | Transmembrane | 1 . . . 453 | 453/454 | 0.0 |
| | protease, | 1 . . . 454 | (99%) | |
| | serine 3 (EC 3.4.21.-) | | 453/454 | |
| | (Serine protease | | (99%) | |
| | TADG-12) (Tumor | | | |
| | associated | | | |
| | differentially- | | | |
| | expressed | | | |
| | gene-12 protein) - | | | |
| | Homo sapiens | | | |
| | (Human), 454 aa. | | | |
| Q8VDE0 | TMPRSS3 protein - | 1 . . . 453 | 402/453 | 0.0 |
| | Mus musculus | 1 . . . 453 | (88%) | |
| | (Mouse), 453 aa. | | 427/453 | |
| | | | (93%) | |
| Q8WY52 | Potential serine | 1 . . . 324 | 316/324 | 0.0 |
| | protease TMPRSS3 - | 1 . . . 324 | (97%) | |
| | Homo sapiens | | 317/324 | |
| | (Human), 344 aa. | | (97%) | |
| Q96T73 | Epitheliasin - | 52 . . . 450 | 188/411 | 4e−92 |
| | Homo sapiens | 89 . . . 491 | (45%) | |
| | (Human), 492 aa. | | 242/411 | |
| | | | (58%) | |

[0569] PFam analysis predicts that the NOV46a protein contains the domains shown in the Table 46F.

TABLE 46F
Domain Analysis of NOV46a

| | NOV46a | Identities/Similarities | Expect |
|---|---|---|---|
| Pfam Domain | Match Region | for the Matched Region | Value |
| Idl_recept_a | 71 . . . 109 | 15/43 (35%) | 0.00092 |
| | | 29/43 (67%) | |
| SRCR | 110 . . . 205 | 22/117 (19%) | 0.038 |
| | | 63/117 (54%) | |
| trypsin | 217 . . . 443 | 107/261 (41%) | 3.2e−92 |
| | | 179/261 (69%) | |

### Example 47

[0570] The NOV47 clone was analyzed, and the nucleotide and encoded polypeptide sequences are shown in Table 47A.

TABLE 47A
NOV47 Sequence Analysis

| | |
|---|---|
| | SEQ ID NO: 157 3149bp |
| NOV47a, | CTAAAGTTTTTTTCTTTGAATGACAGAACTACAGCATAATGCGTGGCTTCAACCTGCT |
| CG57209-01 | |
| DNA | CCTCTTCTGGGGATGTTGTGTTATGCACAGCTGGGAAGGGCACATAAGACCCACACGG |
| Sequence | |
| | AAACCAAACACAAAGGGTAATAACTGTAGAGACAGTACCTTGTGCCCAGCTTATGCCA |
| | CCTGCACCAATACGGTGGACAGTTACTATTGCACTTGCAAACAAGGCTTCCTGTCCAG |
| | CAATGGGCAAAATCACTTCAAGGATCCAGGAGTGCGATGCPAAGATATTGATGAATGT |
| | TCTCAAAGCCCCCAGCCCTGTGGTCCTAACTCATCCTGCAAAAACCTGTCAGGGAGGT |
| | ACAAGTGCAGCTGTTTAGATGGTTTCTCTTCTCCCACTGGAAATGACTGGGTCCCAGG |
| | AAAGCCGGGCAATTTCTCCTGTACTGATATCAATGAGTGCCTCACCAGCAGGGTCTGC |
| | CCTGAGCATTCTGACTGTGTCAACTCCATGGGAAGCTACAGTTGCAGCTGTCAAGTTG |
| | GATTCATCTCTAGAAACTCCACCTGTGAAGACGTGAATGAATGTGCAGATCCAAGAGC |
| | TTGCCCAGAGCATGCAACTTGTAATAACACTGTTGGAAACTACTCTTGTTTCTGCAAC |
| | CCAGGATTTGAATCCAGCAGTGGCCACTTGAGTTGCCAGGGTCTCAAAGCATCGTGTG |
| | AAGATATTGATGAATGCACTGAAATGTGCCCCATCAATTCAACATGCACCAACACTCC |
| | TGGGAGCTACTTTTGCACCTGCCACCCTGGCTTTGCACCAAGCAGTGGACAGTTGAAT |
| | TTCACAGACCAAGGAGTGGAATGTAGAGATATTGATGAGTGCCGCCAAGATCCATCAA |
| | CCTGTGGTCCTAATTCTATCTGCACCAATGCCCTGGGCTCCTACAGCTGTGGCTGCAT |
| | TGTAGGCTTTCATCCCAATCCAGAAGGCTCCCAGAAAGATGGCAACTTCAGCTGCCAA |
| | AGGGTTCTCTTCAAATGTAAGGAAGATGTGATACCCGATAATAAGCAGATCCAGCAAT |
| | GCCAAGAGGGAACCGCAGTGAAACCTGCATATGTCTCCTTTTGTGCACAAATAAATAA |
| | CATCTTCAGCGTTCTGGACAAAGTGTGTGAAAATAAAACGACCGTAGTTTCTCTGAAG |
| | AATACAACTGAGAGCTTTGTCCCTGTGCTTAAACAAATATCCATGTGGACTAAATTCA |
| | CCAAGGAAGAGACGTCCTCCCTGGCCACAGTCTTCCTGGAGAGTGTGGAAAGCATGAC |
| | ACTGGCATCTTTTTGGAAACCCTCAGCAAATGTCACTCCGGCTGTTCGGGCGGAATAC |
| | TTAGACATTGAGAGCAAAGTTATCAACAAAGAATGCAGTGAAGAGAATGTGACGTTGG |
| | ACTTGGTAGCCAAGGGGGATAAGATGAAGATCGGGTGTTCCACAATTGAGGAATCTGA |
| | ATCCACAGAGACCACTGGTGTGGCTTTTGTCTCCTTTGTGGGCATGGAATCGGTTTTA |
| | AATGAGCGCTTCTTCCAAGACCACCAGGCTCCCTTGACCACCTCTGAGATCAAGCTGA |
| | AGATGAATTCTCGAGTCGTTGGGGGCATAATGACTGGAGAGAAGAAAGACGGCTTCTC |
| | AGATCCAATCATCTACACTCTGGAGAACGTTCAGCCAAAGCAGAAGTTTGAGAGGCCC |
| | ATCTGTGTTTCCTGGAGCACTGATGTGAAGGGTGGAAGATGGACATCCTTTGGCTGTG |
| | TGATCCTGGAAGCTTCTGAGACATATACCATCTGCAGCTGTAATCAGATGGCAAATCT |
| | TGCCGTTATCATGGCGTCTGGGGAGCTCACGATGGACTTTTCCTTGTACATCATTAGC |
| | CATGTAGGCATTATCATCTCCTTGGTGTGCCTCGTCTTGGCCATCGCCACCTTTCTGC |
| | TGTGTCGCTCCATCCGAAATCACAACACCTACCTCCACCTGCACCTCTGCGTGTGTCT |
| | CCTCTTGGCGAAGACTCTCTTCCTCGCCGGTATACACAAGACTGACAACAAGACGGGC |
| | TGCGCCATCATCGCGGGCTTCCTGCACTACCTTTTCCTTGCCTGCTTCTTCTGGATGC |
| | TGGTGGAGGCTGTGATACTGTTCTTGATGGTCAGAAACCTGAAGGTGGTGAATTACTT |
| | CAGCTCTCGCAACATCAAGATGCTGCACATCTGTGCCTTTGGTTATGGGCTGCCGATG |
| | CTGGTGGTGGTGATCTCTGCCAGTGTGCAGCCACAGGGCTATGGAATGCATAATCGCT |
| | GCTGGCTGAATACAGAGACAGGGTTCATCTGGAGTTTCTTGGGGCCAGTTTGCACAGT |
| | TATAGTGATCAACTCCCTTCTCCTGACCTGGACCTTGTGGATCCTGAGGCAGAGGCTT |
| | TCCAGTGTTAATGCCGAAGTCTCAACGCTAAAAGACACCAGGTTACTGACCTTCAAGG |
| | CCTTTGCCCAGCTCTTCATCCTGGGCTGCTCCTGGGTGCTGGGCATTTTTCAGATTGG |
| | ACCTGTGGCAGGTGTCATGGCTTACCTGTTCACCATCATCAACAGCCTGCAGGGGGCC |
| | TTCATCTTCCTCATCCACTGTCTGCTCAACGGCCAGGTACGAGAAGAATACAAGAGGT |
| | GGATCACTGGGAAGACGAAGCCCAGCTCCCAGTCCCAGACCTCAAGGATCTTGCTGTC |
| | CTCCATGCCATCCGCTTCCAAGACGGGTTAAAGCCTTTCTTGCTTTCAAATATGCTAT |
| | GGAGCCACAGTTGAGGACAGTAGTTTCCTGCAGGAGCCTACCCTGAAATCTCTTCTCA |
| | GCTTAACATGGAAATGAGGATCCCACCAGCCCCAGAACCCTCTGGGGAAGAATGTTGG |
| | GGGCCGTCTTCCTGTGGTTGTATGCACTGATGAGAAATCAGACGTTTCTGCTCCAAAC |
| | GACCATTTTATCTTCGTGCTCTGCAACTTCTTCAATTCCAGAGTTTCTGAGAACAGAC |
| | CCAAATTCAATGGCATGACCAAGAACACCTGGCTACCATTTTGTTTTCTCCTGCCCTT |
| | GTTGGTGCATGGTTCTAAGCGTGCCCCTCCAGCGCCTATCATACGCCTGACACAGAGA |
| | ACCTCTCAATAAATGATTTGTCGCCTGTCTGACTGATTTACCCTAAAAAAAAAAAAAA |
| | AAAAAAAAAAAAAAAAA |
| | ORF Start: ATG at 39 ORF Stop: TAA at 2697 |
| | SEQ ID NO: 158 886 aa MW at 97679.1kD |
| NOV47a. | MRGFNLLLFWGCCVMHSWEGHIRPTRKPNTKGNNCRDSTLCRAYATCTNTVDSYYCTC |
| CG57209-01 | |
| Protein | KQGFLSSNGQNHFKDPGVRCKDIDECSQSRQPCGPNSSCKNLSGRYKCSCLDGFSSPT |
| Sequence | |
| | GNDWVPGKPGNFSCTDINECLTSRVCPEHSDCVNSMGSYSCSCQVGFISRNSTCEDVN |
| | ECADRRACPEHATCNNTVGNYSCFCNPGFESSSGHLSCQGLKASCEDIDECTEMCPIN |
| | STCTNTPGSYFCTCHPGPAPSSGQLNFTDQGVECRDIDECRQDPSTCGPNSICTNALG |
| | SYSCGCIVGFHPNPEGSQKDGNFSCQRVLFKCKEDVIPDNKQIQQCQEGTAVKPAYVS |
| | FCAQINNIFSVLDKVCENKTTVVSLKNTTESPVPVLKQISMWTKPTKEETSSLATVFL |
| | ESVESMTLASFWKPSANVTPAVRAEYLDIESKVINKECSEENVTLDLVAKGDKMKIGC |
| | STIEESESTETTGVAFVSFVGMESVLNERFFQDHQAPLTTSEIKLKMNSRVVGGIMTG |
| | EKKDGFSDPIIYTLENVQPKQKFFRPICVSWSTDVKGGRWTSFGCVILEASETYTTCS |
| | CNQMANLAVIMASGELTMDFSLYIISHVGIIISLVCLVLAIATFLLCRSIRNHNTYLH |
| | LHLCVCLLLAKTLFLAGIHKTDNKTGCAIIAGFLHYLFLACPFWMLVEAVILFLMVRN |
| | LKVVNYFSSRNIKMLHICAFGYGLPMLVVVISASVQPQGYGMHNRCWLNTETGFIWSF |
| | LGPVCTVIVINSLLLTWTLWILRQRLSSVNAEVSTLKDTRLLTFKAFAQLFILGCSWV |
| | LGIFQIGPVAGVMAYLFTIINSLQGAPIFLIHCLLNGQVREEYKRWITGKTKPSSQSQ |
| | TSRILLSSMPSASKTG |
| | SEQ ID NO: 159 12851 bp |
| NOV47b. | GCTCCTCTTCTGGGGTGTTGTGTTATGCACAGCTGGGAAGGGCACATAAGACCCACAC |
| CG57209-04 | |
| DNA | GGAAACCAAACACAAAGGGTAATAACTGTAGAGACAGTACCTTGTGCCCAGCTTATGC |
| Sequence | |
| | CACCTGCACCAATACAGTGGACAGTTACTATTGCGCTTGCAAACAAGGCTTCCTGTCC |
| | AGCAATGGGCAAAATCACTTCAAGGATCCAGGAGTGCGATGCAAAGATATTGATGAAT |
| | GTTCTCAAAGCCCCCAGCCCTGTGGTCCTAACTCATCCTGCAAAAACCTGTCAGGGAG |
| | GTACAAGTGCAGCTGTTTAGATGGTTTCTCTTCTCCCACTGGAAATGACTGGGTCCCA |
| | GGAAAGCCGGGCAATTTCTCCTGTACTGATATCAATGAGTGCCTCACCAGCAGCGTCT |
| | GCCCTGAGCATTCTGACTGTGTCAACTCCATGGGAAGCTACAGTTGTAGCTGTCAAGT |
| | TGGATTCATCTCTAGAAACTCCACCTGTGAAGACGTGGATGAATGTGCAGATCCAAGA |
| | GCTTGCCCAGAGCATGCAACTTGTAATAACACTGTTGGAAACTACTCTTGTTTCTGCA |
| | ACCCAGGATTTGAATCCAGCAGTGGCCACTTGAGTTTCCAGGGTCTCAAAGCATCGTG |
| | TGAAGATATTGATGAATGCACTGAAATGTGCCCCATCAATTCAACATGCACCAACACT |
| | CCTGGGAGCTACTTTTGCACCTGCCACCCTGGCTTTGCACCAAGCAATGGACAGTTGA |
| | ATTTCACAGACCAAGGACTGGAATGTAGAGATATTGATGAGTGCCGCCAAGATCCATC |
| | AACCTGTGGTCCTAATTCTATCTGCACCAATGCCCTGGGCTCCTGCAGCTGTGGCTGC |
| | ATTGCAGGCTTTCATCCCAATCCAGAAGGCTCCCAGAAAGATGGCAACTTCAGCTGCC |
| | AAAGGGTTCTCTTCAAATGTAAGGAAGATGTGATACCCGATAATAAGCAGATCCAGCA |
| | ATGCCAAGAGGGkACCGCAGTGAAACCTGCATATGTCTCCTTTTGTGCACAAATAAAT |
| | AACATCTTCAGCGTTCTGGACAAAGTGTGTGAAAATAAAACGACCGTAGTTTCTCTGA |
| | AGAATACAACTGAGAGCTTTGTCCCTGTGCTTAAACAAATATCCACGTGGACTAAATT |
| | CACCAAGGAAGAGACGTCCTCCCTGGCCACAGTCTTCCTGGAGAGTGTGGAkAGCATG |
| | ACACTGGCATCTTTTTGGAAACCCTCAGCAAATGTCACTCCGGCTGTTCGGACGGAAT |
| | ACTTAGACATTGAGAGCAAAGTTATCAACAAAGAATGCAGTGAAGAGAATGTGACGTT |
| | GGACTTGGTAGCCAAGGGGGATAAGATGAAGATCGGGTGTTCCACAATTGAGGAATCT |
| | GAATCCACAGAGACCACTGGTGTGGCTTTTGTCTCCTTTGTGGGCATGGAATCGGTTT |
| | TAAATGAGCGCTTCTTCCAAGACCACCAGGCTCCCTTGACCACCTCTGAGATCAAGCT |
| | GAAGATGAATTCTCGAGTCGTTGGGGGCATAATGACTGGAGAGAAGAAAGACGGCTTC |
| | TCAGATCCAATTATCTACACTCTGGAGAACGTTCAGCCAAAGCAGAAGTTTGAGAGGC |
| | CCATCTGTGTTTCCTGGAGCACTGATGTGAAGGGTGGAAGATGGACATCCTTTGGCTG |
| | TGTGATCCTGGAAGCTTCTGAGACATATACCATCTGCAGCTGTAATCAGATGGCAAAT |
| | CTTGCCGTTATCATGGCGTCTGGGGAGCTCACGATGGGCTGCGCCATCATCGCGGGCT |
| | TCCTGCACTACCTTTTCCTTGCCTGCTTCTTCTGGATGCTGGTGGAGGCTGTGATACT |
| | GTTCTTGATGGTCAGAAACCTGAAGGTGGTGAATTACTTCAGCTCTCGCAACATCAAG |
| | ATGCTGCACATCTGTGCCTTTGGTTATGGGCTGCCGATGCTGGTGGTGGTGATCTCTG |
| | CCAGTGTGCAGCCACAGGGCTATGGAATGCATAATCGCTGCTGGCTGAATACAGAGAC |
| | AGGGTTCATCTGGAGTTTCTTGGGGCCAGTTTGCACAGTTATAGTGATCAACTCCCTT |
| | CTCCTGACCTGGACCTTGTGGATCCTGAGGCAGAGGCTTTCCAGTGTTAATGCCGAAG |
| | TCTCAACGCTAAAAGACACCAGGTTACTGACCTTCAAGGCCTTTGCCCAGCTCTTCAT |
| | CCTGGGCTGCTCCTGGGTGCTGGGCATTTTTCAGATTGGACCTGTGGCAGGTGTCATG |
| | GCTTACCTGTTCACCATCATCAACAGCCTGCACGGGGCCTTCATCTTCCTCATCCACT |
| | GTCTGCTCAACGGCCAGGTACGAGAAGAATACAAGAGGTGGATCACTGGGAAGACGAA |
| | GCCCAGCTCCCAGTCCCAGACCTCAAGGATCTTGCTGTCCTCCATGCCATCCGCTTCC |
| | AAGACGGGTTAAAGTCCTTTCTTGCTTTCAAATATGCTATGGAGCCACAGTTGAGGAC |
| | AGTAGTTTCCTGCAGGAGCCTACCCTGAAATCTCTTCTCAGCTTAACATGGAAATGAG |
| | GATCCCACCAGCCCCAGAACCCTCTGGGGAAGAATGTTGGGGGCCGTCTTCCTGTGGT |
| | TGTATGCACTGATGAGAAATCAGGCGTTTCTGCTCCAAACGACCATTTTATCTTCGTG |
| | CTCTGCAACTTCTTCAATTCCAGAGTTTCTGAGAACAGACCCAAATTCAATGGCATGA |
| | CCAAGAACACCTGGCTACCATTTTGTTTTCTCCTGCCCTTGTTGGTGCATGGTTCTAA |
| | GCGTGCCCCTCCAGCGCCTATCATACGCCTGACACAGAGAACCTCTCAATAAATGATT |
| | TGTCGCCTG |
| | ORF Start: at 13 ORF Stop: TAA at 2446 |
| | SEQ ID NO: 160 811 aa MW at 89011.6kD |
| NOV47b, | GCCVMHSWEGHIRPTRKPNTKGNNCRDSTLCPAYATCTNTVDSYYCACKQGFLSSNGQ |
| CG57209-04 | |
| Protein | NHFKDPGVRCKDIDECSQSPQPCGPNSSCKNLSGRYKCSCLDGFSSPTGNDWVPGKPG |
| Sequence | |
| | NFSCTDTNECLTSSVCPEHSDCVNSMGSYSCSCQVGFTSRNSTCEDVDECADPRACPE |
| | HATCNNTVGNYSCFCNPGFESSSGHLSFQGLKASCEDIDECTEMCPINSTCTNTPGSY |
| | FCTCHPGFAPSNGQLNFTDQGVECRDIDECRQDPSTCGPNSICTNALGSCSCGCIAGF |
| | HPNPEGSQKDGNFSCQRVLFKCKEDVIPDNKQIQQCQEGTAVKPAYVSFCAQINNIFS |
| | VLDKVCENKTTVVSLKNTTESFVPVLKQISTWTKPTKEETSSLATVFLESVESMTLAS |
| | FWKPSANVTPAVRTEYLDIESKVINKECSEENVTLDLVAKGDKMKIGCSTTEESESTE |
| | TTGVAFVSFVGMESVLNERFFQDHQAPLTTSEIKLKMNSRVVGGIMTGEKKDGFSDPT |
| | IYTLENVQPKQKFERPICVSWSTDVKGGRWTSFGCVILEASETYTTCSCNQMANLAVI |
| | MASGELTMGCAIIAGFLHYLFLACFFWMLVEAVILFLMVRNLKVVNYFSSRNIKMLHI |
| | CAFGYGLPMLVVVTSASVQPQGYGMHNRCWLNTETGFIWSFLGPVCTVIVINSLLLTW |
| | TLWILRQRLSSVNAEVSTLKDTRLLTFKAFAQLFILGCSWVLGIFQTGPVAGVMAYLF |
| | TIINSLQGAFIFLIHCLLNGQVREEYKRWTTGKTKPSSQSQTSRILLSSMPSASKTG |
| | SEQ ID NO: 161 1764 bp |
| NOV47c, | AGATCTTGGGAAGGGCACATAAGACCCACACGGAAACCAAACACAAAGGGTAATAACT |
| 165275217 | |
| DNA | GTAGAGACAGTACCTTGTGCCCAGCTTATGCCACCTGCACCAATACAGTGGACAGTTA |
| Sequence | |
| | CTATTGCACTTGCAAACAAGGCTTCCTGTCCAGCAATGGGCAAAATCACTTCAAGGAT |
| | CCAGGAGTGCGATGCAAAGATATTGATGAATGTTCTCAAAGCCCCCAGCCCTGTGGTC |
| | CTAACTCATCCTGCAAAAACCTGTCAGGGAGGTACAAGTGCAGCTGTTTAGATGGTTT |
| | CTCTTCTCCCACTGGAAATGACTGGGTCCCAGGAAAGCCGGGCAATTTCTCCTGTACT |
| | GATATCAATGAGTGCCTCACCAGCAGGGTCTGCCCTGAGCATTCTGACTGTGTCAACT |
| | CCATGGGAAGCTACAGTTGCAGCTGTCAAGTTGGATTCATCTCTAGAAACTCCACCTG |
| | TGGAGACGTGAATGAATGTGCAGATCCAAGAGCTTGCCCAGAGCATGCAACTTGTAAT |
| | AACACTGTTGGAAACTACTCTTGTTTCTGCAACCCAGGATTTGAATCCAGCAGTGGCC |
| | ACTTGAGTTTCCAGGGTCTCAAAGCATCGTGTGAAGATATTGATGAATGCACTGAAAT |
| | GTGCCCCATCAATTCAACATGCACCAACACTCCTGGGAGCTACTTTTGCACCTGCCAC |
| | CCTGGCTTTGCACCAAGCAATGGACAGTTGAATTTCACAGACCAAGGAGTGGAATGTA |
| | GAGATATTGATGAGTGCCGCCAAGATCCATCAAACCTGTGGTCCTATTCTATCTGCAC |
| | CAATGCCCTGGGCTCCTACAGCTGTGGCTGCATTGTAGGCTTTCATCCCAATCCAGAA |
| | GGCTCCCAGAAAGATGGCAACTTCAGCTGTCAAAGGGTTCTCTTCAAATGTAAGGAAG |
| | ATGTGATACCCGATAATAAGCAGATCCAGCAATGCCAAGAGGGAACCGCAGTGAAACC |
| | TGCATATGTCTCCTTTTGTGCACAAATAAATAACATCTTCAGCGTTCTGGACAAAGTG |
| | TGTGAAAATAAAACGACCGTAGTTTCTCTGAAGAATACAACTGAGAGCTTTGTCCCTG |
| | TGCTTAAACAAATATCCACGTGGACTAAATTCACCAAGGAAGAGACGTCCTCCCTGGC |
| | CACAGTCTTCCTGGAGAGTGTGGAAAGCATGACACTGGCATCTTTTTGGAAACCCTCA |
| | GCAAATGTCACTCCGGCTGTTCGGACGGAATACTTAGACATTGAGAGCAAAGTTATCA |
| | ACAAAGAATGCAGTGAAGAGAATGTGACGTTGGACTTGGTAGCCAAGGGGGATAAGAT |
| | GAAGATCGGGTGTTCCACAATTGAGGAATCTGAATCCACAGAGACCACTGGTGTGGCT |
| | TTTGTCTCCTTTGTGGGCATGGAATCGGTTTTAAATGAGCGCTTCTTCCAAGACCACC |
| | AGGCTCCCTTGACCACCTCTGAGATCAAGCTGAAGATGAATTCTCGAGTCGTTGGGGG |
| | CATAATGACTGGAGAGAAGAAAGACGGCTTCTCAGATCCAATCATCTACACTCTGGAG |
| | AACGTTCAGCCAAAGCAGAAGTTTGAGAGGCCCATCTGTGTTTCCTGGAGCACTGATG |
| | TGAAGGGTGGAAGATGGACATCCTTTGGCTGTGTGATCCTGGAAGCTTCTGAGACATA |
| | TACCATCTGCAGCTGTAATCAGATGGCAAATCTTGCCGTTATCATGGCGTCTGCGGAG |
| | CTCACGGTCGACAAGGGCGAATTT |
| | ORF Start: at 1 ORF Stop: end of sequence |
| | SEQ ID NO: 162 588 aa MW at 64167.2kD |
| NOV47c, | RSWEGHIRPTRKPNTKGNNCRDSTLCPAYATCTNTVDSYYCTCKQGFLSSNGQNHPKD |
| 165275217 | |
| Protein | PGVRCKDIDECSQSPQPCGPNSSCKNLSGRYKCSCLDGFSSPTGNDWVPGKPGNFSCT |
| Sequence | |
| | DINECLTSRVCPEHSDCVNSMGSYSCSCQVGFISRNSTCGDVNECADPRACPEHATCN |
| | NTVGNYSCPCNPGFESSSGHLSPQGLKASCEDIDECTEMCPINSTCTNTPGSYPCTCH |
| | PGFAPSNGQLNFTDQGVECRDIDECRQDPSTCGRNSICTNALGSYSCGCIVGFHPNPE |
| | GSQKDGNFSCQRVLFKCKEDVIPDNKQIQQCQEGTAVKPAYVSPCAQINNIFSVLDKV |
| | CENKTTVVSLKNTTESFVPVLKQISTWTKFTKEETSSLATVFLESVESMTLASFWKPS |
| | ANVTPAVRTEYLDIESKVINKECSEENVTLDLVAKGDKMKIGCSTIEESESTETTGVA |
| | FVSFVGMESVLNERFFQDHQAPLTTSEIKLKMNSRVVGGIMTGEKKDGFSDPIIYTLE |
| | NVQPKQKFERPICVSWSTDVKGGRWTSFGCVILEASETYTTCSCNQMANLAVIMASGE |
| | LTVDKGEF |

[0571] Sequence comparison of the above protein sequences yields the following sequence relationships shown in Table 47B.

TABLE 47B
Comparison of NOV47a against NOV47b and NOV47c

| | NOV47a Residues/ | Identities/Similarities |
|---|---|---|
| Protein Sequence | Match Residues | for the Matched Region |
| NOV47b | 11 . . . 886 | 783/876 (89%) |
| | 1 . . . 811 | 788/876 (89%) |
| NOV47c | 17 . . . 599 | 565/583 (96%) |
| | 2 . . . 584 | 567/583 (96%) |

[0572] Further analysis of the NOV47a protein yielded the following properties shown in Table 47C.

TABLE 47C
Protein Sequence Properties NOV47a

| | |
|---|---|
| PSort | 0.6850 probability located in endoplasmic reticulum |
| analysis: | (membrane); 0.6400 probability located in plasma membrane: |
| | 0.4600 probability located in Golgi body; 0.1000 probability |
| | located in endoplasmic reticulum (lumen) |
| SignalP | Cleavage site between residues 18 and 19 |
| analysis: | |

[0573] A search of the NOV47a protein against the Geneseq database, a proprietary database that contains sequences published in patents and patent publication, yielded several homologous proteins shown in Table 47D.

TABLE 47D
Geneseq Results for NOV47a

| | | | Identities/ | |
|---|---|---|---|---|
| | | | Similari- | |
| | | NOV47a | ties | |
| | Protein/ | Residues/ | for the | |
| Geneseq | Organism/Length | Match | Matched | Expect |
| Identifier | [Patent #, Date] | Residues | Region | Value |
| AAB71869 | Human EMR1 seven | 1 . . . 886 | 886/886 | 0.0 |
| | transmembrane | 1 . . . 886 | (100%) | |
| | domain - Homo | | 886/886 | |
| | sapiens, 886 aa. | | (100%) | |
| | [WO200109328-A1, | | | |
| | 08 FEB. 2001] | | | |
| AAB01249 | Human EMR1 | 1 . . . 886 | 880/886 | 0.0 |
| | hormone receptor - | 1 . . . 880 | (99%) | |
| | Homo sapiens, 880 aa. | | 880/886 | |
| | [WO200034473-A2, | | (99%) | |
| | 15 JUN. 2000] | | | |
| AAE17043 | Human CD 97 | 74 . . . 872 | 272/853 | e−122 |
| | protein - Homo | 16 . . . 817 | (31%) | |
| | sapiens, 835 aa. | | 422/853 | |
| | [WO200202602-A2, | | (48%) | |
| | 10 JAN. 2000] | | | |
| AAB15728 | Human CD97 protein - | 74 . . . 872 | 272/853 | e−122 |
| | Homo sapiens, 835 aa. | 16 . . . 817 | (31%) | |
| | [WO200052039-A2, | | 422/853 | |
| | 08 SEP. 2000] | | (48%) | |
| AAY41090 | Human CD97 protein - | 74 . . . 872 | 272/853 | e−122 |
| | Homo sapiens, | 16 . . . 817 | (31%) | |
| | 835 aa. | | 422/853 | |
| | [WO9945111-A1, | | (48%) | |
| | 10 SEP. 1999] | | | |

[0574] In a BLAST search of public sequence datbases, the NOV47a protein was found to have homology to the proteins shown in the BLASTP data in Table 47E.

TABLE 47E
Public BLASTP Results for NOV47a

| | | | Identities/ | |
|---|---|---|---|---|
| | | | Similari- | |
| | | NOV47a | ties | |
| Protein | | Residues/ | for the | |
| Accession | Protein/ | Match | Matched | Expect |
| Number | Organism/Length | Residues | Portion | Value |
| Q14246 | Cell surface | 1 . . . 886 | 886/886 | 0.0 |
| | glycoprotein EMR1 | 1 . . . 886 | (100%) | |
| | precursor (EMR1 | | 886/886 | |
| | hormone receptor) - | | (100%) | |
| | Homo sapiens | | | |
| | (Human), 886 aa. | | | |
| Q61549 | Cell surface | 1 . . . 886 | 606/937 | 0.0 |
| | glycoprotein EMR1 | 1 . . . 931 | (64%) | |
| | precursor (EMR1 | | 709/937 | |
| | hormone receptor) | | (74%) | |
| | (Cell surface | | | |
| | glycoprotein F4/80) - | | | |
| | Mus musculus | | | |
| | (Mouse), 931 aa. | | | |
| Q9BY15 | EGF-like | 229 . . . 871 | 245/644 | e−127 |
| | module-containing | 31 . . . 625 | (38%) | |
| | mucin-like | | 370/644 | |
| | receptor EMR3 - | | (57%) | |
| | Homo sapiens | | | |
| | (Human), 652 aa. | | | |
| O00718 | CD97 - Homo | 74 . . . 872 | 272/853 | e−121 |
| | sapiens (Human), | 16 . . . 817 | (31%) | |
| | 835 aa. | | 422/853 | |
| | | | (48%) | |
| P48960 | Leucocyte antigen | 74 . . . 872 | 270/853 | e−120 |
| | CD97 precursor - | 16 . . . 817 | (31%) | |
| | Homo sapiens | | 420/853 | |
| | (Human), 835 aa. | | (48%) | |

[0575] PFam analysis predicts that the NOV47a protein contains the domains shown in the Table 47F.

TABLE 47F
Domain Analysis of NOV47a

| | NOV47a | Identities/Similarities | Expect |
|---|---|---|---|
| Pfam Domain | Match Region | for the Matched Region | Value |
| EGF | 35 . . . 70 | 13/47 (28%) | 0.29 |
| | | 26/47 (55%) | |
| TILa | 34 . . . 89 | 16/58 (28%) | 0.42 |
| | | 36/58 (62%) | |
| EGF | 176 . . . 212 | 15/47 (32%) | 0.0038 |
| | | 25/47 (53%) | |
| EGF | 225 . . . 255 | 13/47 (28%) | 0.29 |
| | | 23/47 (49%) | |
| GPS | 546 . . . 596 | 19/54 (35%) | 1.5e−18 |
| | | 46/54 (85%) | |
| 7tm_2 | 599 . . . 851 | 96/276 (35%) | 9.2e−104 |
| | | 228/276 (83%) | |

### Example 48

[0576] The NOV48 clone was analyzed, and the nucleotide and encoded polypeptide sequences are shown in Table 48A.

TABLE 48A
NOV48 Sequence Analysis

| | |
|---|---|
| | SEQ ID NO: 163 4080 bp |
| NOV48a, | GAGTGGAGTTCTGGAGGAATGTTTACCAGACACAGAGCCCAGAGGGACAGCGCCCAGA |
| CG59325-01 | |
| DNA | GCCCAGATAGAGAGACACGGCCTCACTGGCTCAGCACCAGGGTCCCCTTCCCCCTCCT |
| Sequence | |
| | CAGCTCCCTCCCTGGCCCCTTTAAGGAAAGAGCTGATCCTCTCCTCTCTTGAGTTAACC |
| | CCTGATTGTCCAGGTGGCCCCTGGCTCTGGCCTGGTGGGCGGAGGCAAAGGGGGAGCC |
| | AGGGGCGGAGAAAGGGTTGCCCAAGTCTGGGAGTGAGGGAAGGAGGCAGGGGTGCTGA |
| | GAAGGCGGCTGCTGGGCAGAGCCGGTGGCAAGGGCCTCCCCTGCCGCTGTGCCAGGCA |
| | GGCAGTGCCAAATCCGGCGAGCCTGGAGCTGGGGGGAGGGCCGGGGACAGCCCGGCCC |
| | GCTGCCCCCTCCCCCGCTGGGAGCCCAGCAACTTCTGAGGAAAGTTTGGCACCCATGG |
| | CGTGGCGGTGCCCCAGGATGGGCAGGGTCCCGCTGGCCTGGTGCTTGGCGCTGTGCGG |
| | CTGGGCGTGCATGGCCCCCAGGGGCACGCAGGCTGAAGAAAGTCCCTTCGTGGGCAAC |
| | CCAGGGAATATCACAGGTGCCCGGGGACTCACGGGCACCCTTCGGTGTCAGCTCCAGG |
| | TTCAGGGAGAGCCCCCCGAGGTACATTGGCTTCGGGATGGACAGATCCTGGAGCTCGC |
| | GGACAGCACCCAGACCCAGGTGCCCCTGGGTGAGGATGAACAGGATGACTGGATAGTG |
| | GTCAGCCAGCTCAGAATCACCTCCCTGCAGCTTTCCGACACGGGACAGTACCAGTGTT |
| | TGGTGTTTCTGGGACATCAGACCTTCGTGTCCCAGCCTGGCTATGTTGGGCTGGAGGG |
| | CTTGCCTTACTTCCTGGAGGAGCCCGAAGACAGGACTGTGGCCGCCAACACCCCCTTC |
| | AACCTGAGCTCCCAAGCTCAGGGACCCCCAGAGCCCGTGGACCTACTCTGGCTCCAGG |
| | ATGCTGTCCCCCTGGCCACGGCTCCAGGTCACGGCCCCCAGCGCAGCCTGCATGTTCC |
| | AGGGCTGAACAAGACATCCTCTTTCTCCTGCGAAGCCCATAACGCCAAGGGGGTCACC |
| | ACATCCCGCACAGCCACCATCACAGTGCTCCCCCAGCAGCCCCGTAACCTCCACCTGG |
| | TCTCCCGCCAACCCACGGAGCTGGAGGTGGCTTGGACTCCAGGCCTGAGCGGCATCTA |
| | CCCCCTGACCCACTGCACCCTGCAGGCTGTGCTGTCAGACGATGGGATGGGCATCCAG |
| | GCGGGAGAACCAGACCCCCCAGAGGAGCCCCTCACCTCGCAAGCATCCGTGCCCCCCC |
| | ATCAGCTTCGGCTAGGCAGCCTCCATCCTCACCCCCCTTATCACATCCGCGTGGCATG |
| | CACCAGCAGCCAGGGCCCCTCATCCTGGACCCACTGGCTTCCTGTGGAGACGCCGGAG |
| | GGAGTGCCCCTGGGCCCCCCTGAGAACATTAGTGCTACGCGGAATGGGAGCCAGGCCT |
| | TCGTGCATTGGCAAGAGCCCCGGGCGCCCCTGCAGGGTACCCTGTTAGGGTACCGGCT |
| | GGCGTATCAAGGCCAGGACACCCCAGAGGTGCTAATGGACATAGGGCTAAGGCAAGAG |
| | GTGACCCTGGAGCTGCAGGGGGACGGGTCTGTGTCCAATCTGACAGTGTGTGTGGCAG |
| | CCTACACTGCTGCTGGGGATGGACCCTGGAGCCTCCCAGTACCCCTGGAGGCCTGGCG |
| | CCCAGGGGAAGCACAGCCAGTCCACCAGCTGGTGAAGGAACCTTCAACTCCTGCCTTC |
| | TCGTGGCCCTGGTGGTATGTACTGCTAGGAGCAGTCGTGGCCGCTGCCTGTGTCCTCA |
| | TCTTGGCTCTCTTCCTTGTCCACCGGCGAAAGAAGGAGACCCGTTATGGAGAAGTGTT |
| | TGAACCAACAGTGGAAAGAGGTGAACTGGTAGTCAGGTACCGCGTGCGCAAGTCCTAC |
| | AGAAGCTGCGGGATGTGATGGTGGACCGGCACAAGGTGGCCCTGGGGAAGACTCTGGG |
| | AGAGGGAGAGTTTGGAGCTGTGATGGAAGGCCAGCTCAACCAGGACGACTCCATCCTC |
| | AAGGTGGCTGTGAAGACGATGAAGATTGCCATCTGCACGAGGTCAGAGCTGGAGGATT |
| | TCCTGAGTGAAGCGGTCTGCATGAAGGAATTTGACCATCCCAACGTCATGAGGCTCAT |
| | CGGTGTCTGTTTCCAGGGTTCTGAACGAGAGAGCTTCCCACCACCTGTGGTCATCTTA |
| | CCTTTCATGAAACATGGAGACCTACACAGCTTCCTCCTCTATTCCCGGCTCGGGGGCC |
| | AGCCAGTGTACCTGCCCACTCAGATGCTAGTGAAGTTCATGGCAGACATCGCCAGTGG |
| | CATGGAGTATCTGAGTACCAAGAGATTCATACACCGGGACCTGGCGGCCAGGAACTGC |
| | ATGCTGAATGAGAACATGTCCGTGTGTGTGGCGGACTTCGGGCTCTCCAAGAAGATCT |
| | ACAATGGGGACTACTACCGCCAGGGACGTATCGCCAAGATGCCAGTCAAGTGGATTGC |
| | CATTGAGAGTCTAGCTGACCGTGTCTACACCAGCAAGAGCGATGTGTGGTCCTTCGGG |
| | GTGACAATGTGGGAGATTGCCACAAGAGGCCAAACCCCATATCCGGGCGTGGAGAACA |
| | GGATGGACTGTATGCCTTGATGTCGCGGTGCTGGGAGCTAAATCCCCAGGACCGGCCA |
| | AGTTTTACAGAGCTGCGGGAAGATTTGGAGAACACACTGAAGGCCTTGCCTCCTGCCC |
| | AGGAGCCTGACGAAATCCTCTATGTCAACATGGATGAGGGTGGAGGTTATCCTGAACC |
| | CCCTGGAGCTGCAGGAGGAGCTGACCCCCCAACCCAGCCAGACCCTAAGGATTCCTGT |
| | AGCTGCCTCACTGCGGCTGAGGTCCATCCTGCTGGACGCTATGTCCTCTGCCCTTCCA |
| | CAACCCCTAGCCCCGCTCAGCCTGCTGATAGGGGCTCCCCAGCAGCCCCAGGGCAGGA |
| | GGATGGTGCCTGAGACAACCCTCCACCTGGTACTCCCTCTCAGGATCCAAGCTAAGCA |
| | CTGCCACTGGGGGAAACTCCACCTTCCCACTTTCCCACCCCACGCCTTATCCCCACTT |
| | GCAGCCCTGTCTTCCTACCTATCCCACCTCCATCCCAGACAGGTCCCTGGCCTTCTCT |
| | GTGCAGTAGCATCACCTTGAAAGCAGTAGCATCACCATCTGTAAAAGGAAGGGGTTGG |
| | ATTGCAATATCTGAAGCCCTCCCAGGTGTTAACATTCCAAGACTCTAGAGTCCAAGGT |
| | TTAAAGAGTCTAGATTCAAAGGTTCTAGGTTTCAAAGATGCTGTGAGTCTTTGGTTCT |
| | AAGGACCTGAAATTCCAAAGTCTCTAATTCTATTAAAGTGCTAAGGTTCTAAGGCCTA |
| | CTTTTTTTTTTTTTTTTTTTTTTTTTTTTTTTTTTGCGATAGAGTCTCACTGTGTCAC |
| | CCAGGCTGGAGTGCAGTGGTGCAATCTCGCCTCACTGCAACCTTCACCTACCGAGTTC |
| | AAGTGATTTTCCTGCCTTGGCCTCCCAAGTAGCTGGGATTACAGGTGTGTGCCACCAC |
| | ACCCGGCTAATTTTTATATTTTTAGTAGAGACAGGGTTTCACCATGTTGGCCAGGCTG |
| | GTCTAAAACTCCTGACCTCAAGTGATCTGCCCACCTCAGCCTCCCAAAGTGCTGAGAT |
| | TACAGGCATGAGCCACTGCACTCAACCTTAAGACCTACTGTTCTAAAGCTCTGACATT |
| | ATGTGGTTTTAGATTTTCTGGTTCTAACATTTTTGATAAAGCCTCAAGGTTTTAGGTT |
| | CTAAGTTCTAAGATTCTGATTTTAGGAGCTAAAGGCTCTATGAGTCTAGATGTTTATT |
| | CTTCTAGAGTTCAGAGTCCTTAAAATGTAAGATTATAGATTCTAAAGATTCTATAGTT |
| | CTAGACATGGAGGTTCTAAG |
| | ORF Start ATG at 461 ORF Stop: TGA at 3143 |
| | SEQ ID NO: 164 894 aa MW at 98274.7kD |
| NOV48a, | MAWRCPRMGRVPLAWCLALCGWACMAPRGTQAEESPFVGNPGNTTGARGLTGTLRCQL |
| CG59325-01 | |
| Protein | QVQGEPPEVHWLRDGQILELADSTQTQVPLGEDEQDDWIVVSQLRITSLQLSDTGQYQ |
| Sequence | |
| | CLVFLGHQTFVSQPGYVGLEGLPYFLEEPEDRTVAANTPFNLSCQAQGPPEPVDLLWL |
| | QDAVPLATAPGHGPQRSLHVPGLNKTSSFSCEAHNAKGVTTSRTATITVLPQQPRNLH |
| | LVSRQPTELEVAWTPGLSGIYPLTHCTLQAVLSDDGMGIQAGEPDPPEEPLTSQASVP |
| | PHQLRLGSLHPHPPYHIRVACTSSQGPSSWTHWLPVETPEGVPLGPPENISATRNGSQ |
| | AFVHWQEPRAPLQGTLLGYRLAYQGQDTPEVLMDIGLRQEVTLELQGDGSVSNLTVCV |
| | AAYTAAGDGPWSLPVPLEAWRPGEAQPVHQLVKEPSTPAFSWPWWYVLLGAVVAAACV |
| | LTLALFLVHRRKKETRYGEVFEPTVERGELVVRYRVRKSYSRRTTEATLNSLGISEEL |
| | KEKLRDVMVDRHKVALGKTLGEGEFGAVMEGQLNQDDSILKVAVKTMKIAICTRSELE |
| | DFLSEAVCMKEFDHPNVMRLIGVCFQGSERESFPAPVVILPFMKHGDLHSFLLYSRLG |
| | GQPVYLPTQMLVKFMADTASGMEYLSTKRFTHRDLAARNCMLNENMSVCVADFGLSKK |
| | IYNGDYYRQGRIAKMPVKWIAIESLADRVYTSKSDVWSFGVTMWEIATRGQTPYPGVE |
| | NSEIYDYLRQGNRLKQPADCLDGLYALMSRCWELNPQDRRSFTELREDLENTLKALPP |
| | AQEPDEILYVNMDEGGGYPEPPGAAGGADPPTQRDRKDSCSCLTAAEVHPAGRYVLCP |
| | STTPSPAQPADRGSPAAPGQEDGA |
| | SEQ ID NO: 165 2196 bp |
| NOV48b, | AGCAACTTCTGAGGAAAGTTTGCACCCATGGCGTGGCGGTGCCCCAGGATGGGCAGGG |
| CG59325-03 | |
| DNA | TCCCGCTGGCCTGGTGCTTGGCGCTGTGCGGCTGGGCGTGCATGGCCCCCAGGGGCAC |
| Sequence | |
| | GCAGGCTGAAGAAAGTCCCTTCGTGGGCAACCCAGGGAATATCACAGGTGCCCGTGAG |
| | TCCCCGGGCACCCTTCGGTGTCAGCTCCAGGTTCAGGGAGAGCCCCCCGAGGTACATT |
| | GGCTTCGGGATGGACAGATCCTGGAGCTCGCGGACAGCACCCAGACCCAGGTGCCCCT |
| | GGGTGAGGATGAACAGGATGACTGGATAGTGGTCAGCCAGCTCAGAATCACCTCCCTG |
| | CAGCTTTCCGACACGGGACAGTACCAGTGTTTGGTGTTTCTGGGACATCAGACCTTCG |
| | TGTCCCAGCCTGGCTATGTTGGGCTGGAGGGCTTGCCTTACTTCCTGGAGGAGCCCGA |
| | AGACAGGACTGTGGCCGCCAACACCCCCTTCAACCTGAGCTGCCAAGCTCAGGGACCC |
| | CCAGAGCCCGTGGACCTACTCTGGCTCCAGGATGCTGTCCCCCTGGCCACGGCTCCAG |
| | GTCACGGCCCCCAGCGCAGCCTGCATGTTCCAGGGCTGAACAAGACATCCTCTTTCTC |
| | CTGCGAAGCCCATAACGCCAAGGGGGTCACCACATCCCGCACAGCCACCATCACAGTG |
| | CTCCCCCAGCAGCCCCGTAACCTCCACCTGGTCTCCCACCAGCTGGTGAAGGAATCTT |
| | CAACTCCTGCCTTCTCGTGGCCCTGGTGGTATGTACTGCTAGGAGCAGTCGTGGCCGC |
| | TGCCTGTGTCCTCATCTTGGCTCTCTTCCTTGTCCACCGGCGAAAGAAGGAGACCCGT |
| | TATGGAGAAGTGTTTGAACCAACAGTGGATAGAGGTGAACTGGTAGTCAGGTACCGCG |
| | TGCGCAAGTCCTACAGTCGTCGGACCACTGAAGCTACCTTGAACAGCCTGGGCATCAG |
| | TGAAGAGCTGAAGGAGAAGCTGCGGGATGTGATGGTGGACCGGCACAAGGTGGCCCTG |
| | GGGAAGACTCTGGGAGAGGGAGAGTTTGGAGCTGTGATGGAAGGCCAGCTCAACCAGG |
| | ACGACTCCATCCTCAAGGTGGCTGTGAAGACGATGAAGATTGCCATCTGCACGAGGTC |
| | AGAGCTGGAGGATTTCCTGAGTGAAGCGGTCTGCATGAAAGGAATTTGACCATCCCAC |
| | GTCATGAGGCTCATCGGTGTCTGTTTCCAGGGTTCTGAACGAGAGAGCTTCCCAGCAC |
| | CTGTGGTCATCTTACCTTTCATGAAACATGGAGACCTACACAGCTTCCTCCTCTATTC |
| | CCGGCTCGGGGACCAGCCAGTGTACCTGCCCACTCAGATGCTAGTGAAGTTCATGGCA |
| | GACATCGCCAGTGGCATGGAGTATCTGAGTACCAAGAGATTCATACACCGGGACCTGG |
| | CGGCCAGGAACTGCATGCTGAATGAGAACATGTCCGTGTGTGTGGCGGACTTCGGGCT |
| | CTCCAAGAAGATCTACAATGGGGACTACTACCGCCAGGGACGTATCGCCAAGATGCCA |
| | GTCAAGTGGATTGCCATTGAGAGTCTAGCTGACCGTGTCTACACCAGCAAGAGCGATG |
| | TGTGGTCCTTCGGGGTGACAATGTGGGAGATTGCCACAAGAGGCCAAACCCCATATCC |
| | GGGCGTGGAGAACAGCGAGATTTATGACTATCTGCGCCAGGGAAATCGCCTGAAGCAG |
| | CCTGCGGACTGTCTGGATGGACTGTATGCCTTGATGTCGCGGTGCTGGGAGCTAAATC |
| | CCCAGGACCGGCCAAGTTTTACAGAGCTGCGGGAAGATTTGGAGAACACACTGAAGGC |
| | CTTGCCTCCTGCCCAGGAGCCTGACGAAATCCTCTATGTCAACATGGATGAGGGTGGA |
| | GGTTATCCTGAACCCCCTGGAGCTGCAGGAGGAGCTGACCCCCCAACCCAGCCAGACC |
| | CTAAGGATTCCTGTAGCTGCCTCACTGCGGCTGAGGTCCATCCTGCTGGACGCTATGT |
| | CCTCTGCCCTTCCACAACCCCTAGCCCCGCTCAGCCTGCTGATAGGGGCTCCCCAGCA |
| | GCCCCAGGGCAGGAGGATGGTGCCTGAGACAACCCTCCACCTGGTACTCCCTCTCAGG |
| | ATCCAAGCTAAGCACTGCCACTGGGGAAAACTCCACCTTCCCACTTTCCC |
| | ORF Start: ATG at 28 ORF Stop: TGA at 2113 |
| | SEQ ID NO 166 695 aa MW at 76986.9kD |
| NOV48b | MAWRCPRMGRVPLAWCLALCGWACMAPRGTQAEESPFVGNPGNITGARESPGTLRCQL |
| CG59325-03 | |
| Protein | QVQGEPPEVHWLRDGQTLELADSTQTQVPLGEDEQDDWIVVSQLRITSLQLSDTGQYQ |
| Sequence | |
| | CLVFLGHQTFVSQPGYVGLEGLPYFLEEPEDRTVAANTPFNLSCQAQGPPEPVDLLWL |
| | QDAVPLATAPGHGPQRSLHVPGLNKTSSFSCEAHNAKGVTTSRTATTTVLPQQPRNLH |
| | LVSHQLVKESSTPAFSWPWWYVLLGAVVAAACVLILALFLVHRRKKETRYGEVFEPTV |
| | DRGELVVRYRVRKSYSRRTTEATLNSLGISEELKEKLRDVMVDRHKVALGKTLGEGEF |
| | GAVMEGQLNQDDSILKVAVKTMKTAICTRSELEDFLSEAVCMKEFDHPNVMRLIGVCF |
| | QGSERESFPAPVVILPFMKHGDLHSFLLYSRLGDQPVYLPTQMLVKFMADIASGMEYL |
| | STKRFIHRDLAARNCMLNENMSVCVADFGLSKKTYNGDYYRQGRIAKMPVKWIAIESL |
| | ADRVYTSKSDVWSFGVTMWEIATRGQTPYPGVENSEIYDYLRQGNRLKQPADCLDGLY |
| | ALMSRCWELNPQDRPSFTELREDLENTLKALPPAQEPDEILYVNMDEGGGYPEPPGAA |
| | GGADPPTQPDPKDSCSCLTAAEVHPAGRYVLCPSTTPSPAQPADRGSPAAPGQEDGA |
| | SEQ ID NO: 167 13999 bp |
| NOV48c, | GAGTGGAGTTCTGGAGGAATGTTTACCAGACACAGAGCCCAGAGGGACAGCGCCCAGA |
| CG59325-04 | |
| DNA | GCCCAGATAGAGAGACACGGCCTCACTGGCTCAGCACCAGGGTCCCCTTCCCCCTCCT |
| Sequence | |
| | CAGCTCCCTCCCTGGCCCCTTTAAGAAAGAGCTGATCCTCTCCTCTCTTGAGTTAACC |
| | CCTGATTGTCCAGGTGGCCCCTGGCTCTGGCCTGGTGGGCGGAGGCAAAGGGGGAGCC |
| | AGGGGCGGAGAAAGGGTTGCCCAAGTCTGGGAGTGAGGGAAGGAGGCAGGGGTGCTGA |
| | GAAGGCGGCTGCTGGGCAGAGCCGGTGGCAAGGGCCTCCCCTGCCGCTGTGCCAGGCA |
| | GGCAGTGCCAAATCCGGGGAGCCTGGAGCTGGGGGGAGGGCCGGGGACAGCCCGGCCC |
| | GCTGCCCCCTCCCCCGCTGGGAGCCCAGCAACTTCTGAGGAAAGTTTGGCACCCATGG |
| | CGTGGCGGTGCCCCAGGATGGGCAGGGTCCCGCTGGCCTGGTGCTTGGCGCTGTGCGG |
| | CTGGGCGTGCATGGCCCCCAGGGGCACGCAGGCTGAAGAAAGTCCCTTCGTGGGCAAC |
| | CCAGGGAATATCACAGGTGCCCGGGGACTCACGGGCACCCTTCGGTGTCAGCTCCAGG |
| | TTCAGGGAGAGCCCCCCGAGGTACATTGGCTTCGGGATGGACAGATCCTGGAGCTCGC |
| | GGACAGCACCCAGACCCAGGTGCCCCTGGGTGAGGATGAACAGGATGACTGGATAGTG |
| | GTCAGCCAGCTCAGAATCACCTCCCTGCAGCTTTCCGACACGGGACAGTACCAGTGTT |
| | TGGTGTTTCTGGGACATCAGACCTTCGTGTCCCAGCCTGGCTATGTTGGGCTGGAGGG |
| | CTTGCCTTACTTCCTGGAGGAGCCCGAAGACAGGACTGTGGCCGCCAACACCCCCTTC |
| | AACCTGAGCTGCCAAGCTCAGGGACCCCCAGAGCCCGTGGACCTACTCTGGCTCCAGG |
| | ATGCTGTCCCCCTGGCCACGGCTCCAGGTCACGGCCCCCAGCGCAGCCTGCATGTTCC |
| | AGTGCTCCCCCAGCAGCCCCGTAACCTCCACCTGGTCTCCCGCCAACCCACGGAGCTG |
| | GAGGTGGCTTGGACTCCAGGCCTGAGCGGCATCTACCCCCTGACCCACTGCACCCTGC |
| | AGGCTGTGCTGTCAGACGATGGGATGGGCATCCAGGCGGGAGAACCAGACCCCCCAGA |
| | GGAGCCCCTCACCTCGCAAGCATCCGTGCCCCCCCATCAGCTTCGGCTAGGCAGCCTC |
| | CATCCTCACCCCCCTTATCACATCCGCGTGGCATGCACCAGCAGCCAGGGCCCCTCAT |
| | CCTGGACCCACTGGCTTCCTGTGGAGACGCCGGAGGGAGTGCCCCTGGGCCCCCCTGA |
| | GAACATTAGTGCTACGCGGAATGGGAGCCAGGCCTTCGTGCATTGGCAAGAGCCCCGG |
| | GCGCCCCTGCAGGGTACCCTGTTAGGGTACCGGCTGGCGTATCAAGGCCAGGACACCC |
| | CAGAGGTGCTAATGGACATAGGGCTAAGGCAAGAGGTGACCCTGGAGCTGCAGGGGGA |
| | CGGGTCTGTGTCCAATCTGACAGTGTGTGTGGCAGCCTACACTGCTGCTGGGGATGGA |
| | CCCTGGAGCCTCCCAGTACCCCTGGAGGCCTGGCGCCCAGGGGAAGCACAGCCAGTCC |
| | ACCAGCTGGTGAAGGAACCTTCAACTCCTGCCTTCTCGTGGCCCTGGTGGTATGTACT |
| | GCTAGGAGCAGTCGTGGCCGCTGCCTGTGTCCTCATCTTGGCTCTCTTCCTTGTCCAC |
| | CGGCGAAAGAAGGAGACCCGTTATGGAGAAGTGTTTGAACCAACAGTGGAAAGAGGTG |
| | CTTGAACAGCCTGGGCATCAGTGAAGAGCTGAAGGAGAAGCTGCGGGATGTGATGGTG |
| | GACCGGCACAAGGTGGCCCTGGGGAAGACTCTGGGAGAGGGAGAGTTTGGAGCTGTGA |
| | TGGAAGGCCAGCTCAACCAGGACGACTCCATCCTCAAGGTGGCTGTGAAGACGATGAA |
| | GATTGCCATCTGCACGAGGTCAGAGCTGGAGGATTTCCTGAGTGAAGCGGTCTGCATG |
| | AAGGAATTTGACCATCCCAACGTCATGAGGCTCATCGGTGTCTGTTTCCAGGGTTCTG |
| | AACGAGAGAGCTTCCCAGCACCTGTGGTCATCTTACCTTTCATGAAACATGGAGACCT |
| | ACACAGCTTCCTCCTCTATTCCCGGCTCGGGGGCCAGCCAGTGTACCTGCCCACTCAG |
| | ATGCTAGTGAAGTTCATGGCAGACATCGCCAGTGGCATGGAGTATCTGAGTACCAAGA |
| | GATTCATACACCGGGACCTGGCGGCCAGGAACTGCATGCTGAATGAGAACATGTCCGT |
| | GTGTGTGGCGGACTTCGGGCTCTCCAAGAAGATCTACAATGGGGACTACTACCGCCAG |
| | GGACGTATCGCCAAGATGCCAGTCAAGTGGATTGCCATTGAGAGTCTAGCTGACCGTG |
| | TCTACACCAGCAAGAGCGATGTGTGGTCCTTCGGGGTGACAATGTGGGAGATTGCCAC |
| | AAGAGGCCAAACCCCATATCCGGGCCTGGAGAACAGCGAGATTTATGACTATCTGCGC |
| | CAGGGAAATCGCCTGAAGCAGCCTGCGGACTGTCTGGATGGACTGTATGCCTTGATGT |
| | CGCGGTGCTGGGAGCTAAATCCCCAGGACCGGCCAAGTTTTACAGAGCTGCGGGAAGA |
| | TTTGGAGAACACACTGAAGGCCTTGCCTCCTGCCCAGGAGCCTGACGAAATCCTCTAT |
| | GTCAACATGGATGAGGGTGGAGGTTATCCTGAACCCCCTGGAGCTGCAGGAGGAGCTG |
| | ACCCCCCAACCCAGCCAGACCCTAAGGATTCCTGTAGCTGCCTCACTGCGGCTGAGGT |
| | CCATCCTGCTGGACGCTATGTCCTCTGCCCTTCCACAACCCCTAGCCCCGCTCAGCCT |
| | GCTGATAGGGGCTCCCCAGCAGCCCCAGGGCAGGAGGATGGTGCCTGAGACAACCCTC |
| | CACCTGGTACTCCCTCTCAGGATCCAAGCTAAGCACTGCCACTGGGGGAAACTCCACC |
| | TTCCCACTTTCCCACCCCACGCCTTATCCCCACTTGCAGCCCTGTCTTCCTACCTATC |
| | CCACCTCCATCCCAGACAGGTCCCTGGCCTTCTCTGTGCAGTAGCATCACCTTGAAAG |
| | CAGTAGCATCACCATCTGTAAAAGGAAGGGGTTGGATTGCAATATCTGAAGCCCTCCC |
| | AGGTGTTAACATTCCAAGACTCTAGAGTCCAAGGTTTAAAGAGTCTAGATTCAAAGGT |
| | TCTAGGTTTCAAAGATGCTGTGAGTCTTTGGTTCTAAGGACCTGAAATTCCAAAGTCT |
| | CTAATTCTATTAAAGTGCTAAGGTTCTAAGGCCTACTTTTTTTTTTTTTTTTTTTTTT |
| | TTTTTTTTTTTTGCGATAGAGTCTCACTGTGTCACCCAGGCTGGAGTGCAGTGGTGCA |
| | ATCTCGCCTCACTGCAACCTTCACCTACCGAGTTCAAGTGATTTTCCTGCCTTGGCCT |
| | CCCAAGTAGCTGGGATTACAGGTGTGTGCCACCACACCCGGCTAATTTTTATATTTTT |
| | AGTAGAGACAGGGTTTCACCATGTTGGCCAGGCTGGTCTAAAACTCCTGACCTCAAGT |
| | GATCTGCCCACCTCAGCCTCCCAAAGTGCTGAGATTACAGGCATGAGCCACTGCACTC |
| | AACCTTAAGACCTACTGTTCTAAAGCTCTGACATTATGTGGTTTTAGATTTTCTGGTT |
| | CTAACATTTTTGATAAAGCCTCAAGGTTTTAGGTTCTAAAGTTCTAAGATTCTGATTT |
| | TAGGAGCTAAGGCTCTATGAGTCTAGATGTTTATTCTTCTAGAGTTCAGAGTCCTTAA |
| | AATGTAAGATTATAGATTCTAAAGATTCTATAGTTCTAGACATGGAGGTTCTAAG |
| | ORF Start: ATG at 461 ORF Stop. TGA at 3062 |
| | SEQ ID NO: 168 867 aa MW at 95509.6kD |
| NOV48c, | MAWRCPRMGRVPLAWCLALCGWACMAPRGTQAEESPFVGNPGNITGARGLTGTLRCQL |
| CG59325-04 | |
| Protein | QVQGEPPEVHWLRDGQILELADSTQTQVPLGEDEQDDWIVVSQLRITSLQLSDTGQYQ |
| Sequence | |
| | CLVFLGHQTFVSQPGYVGLEGLPYFLEEPEDRTVAANTPFNLSCQAQGPPEPVDLLWL |
| | QDAVPLATAPGHGPQRSLHVPVLPQQPRNLHLVSRQPTELEVAWTPGLSGIYRLTHCT |
| | LQAVLSDDGMGIQAGEPDPPEEPLTSQA3VPPHQLRLGSLHPHPPYHIRVACTSSQGP |
| | SSWTHWLPVETPEGVPLGPRENISATRNGSQAFVHWQEPRAPLQGTLLGYRLAYQGQD |
| | TPEVLMDIGLRQEVTLELQGDGSVSNLTVCVAAYTAAGDGPWSLPVPLEAWRPGEAQP |
| | VHQLVKERSTPAFSWPWWYVLLGAVVAAACVLILALFLVHRRKKETRYGEVFBPTVER |
| | GELVVRYRVRKSYSRRTTEATLNSLGISEELKEKLRDVMVDRHKVALGKTLGEGEFGA |
| | VMEGQLNQDDSILKVAVKTMKTAICTRSELEDFLSEAVCMKEPDHPNVMRLIGVCFQG |
| | SERESFPAPVVILPFMKHGDLHSFLLYSRLGGQPVYLPTQMLVKFMADIASGMEYLST |
| | KRFIHRDLAARNCMLNENMSVCVADFGLSKKIYNGDYYRQGRIAKMPVKWIAIESLAD |
| | RVYTSKSDVWSFGVTMWEIATRGQTPYPGVENSEIYDYLRQGNRLKQPADCLDGLYAL |
| | MSRCWELNPQDRPSFTELREDLENTLKALPPAQEPDEILYVNMDEGGGYPEPPGAAGG |
| | ADPPTQPDPKDSCSCLTAAEVHPAGRYVLCPSTTPSPAQPADRGSPAAPGQEDGA |
| | SEQ ID NO: 169 1245 bp |
| NOV48d, | AAGCTTGAAGAAAGTCCCTTCGTGGGCAACCCAGGGAATATCACAGGTGCCCGGGGAC |
| 72557413 | |
| DNA | TCACGGGCACCCTTCGGTGTCAGCTCCAGGTTCAGGGAGAGCCCCCCGAGGTACATTG |
| Sequence | |
| | GCTTCGGGATGGACAGATCCTGGAGCTCGCGGACAGCACCCAGACCCAGGTGCCCCTG |
| | GGTGAGGGTGAACAGGATGACTGGATAGTGGTCAGCCAGCTCAGAATCACCTCCCTGC |
| | AGCTTTCCGACACGGGACAGTACCAGTGTTTGGTGTTTCTGGGACATCAGACCTTCGT |
| | GTCCCAGCCTGGCTATGTTGGGCTGGAGGGCTTGCCTTACTTCCTGGAGGAGCCCGAA |
| | GACAGGACTGTGGCCGCCAACACCCCCTTCAACCTGAGCTGCCAAGCTCAGGGACCCC |
| | CAGACCCCGTGGACCTACTCTGGCTCCAGGATGCTGTCCCCCTGGCCACCGCTCCAGG |
| | TCACGCCCCCCAGCGCAGCCTGCATGTTCCAGGGCTGAACAAGACATCCTCTTTCTCC |
| | TCCCCCAGCAGCCCCGTAACCTCCACCTGGTCTCCCGCCAACCCACGGAGCTGGAGGT |
| | CCCTCACCTCGCAAGCATCCGTGCCCCCCCATCAGCTTCGGCTAGGCAGCCTCCATCC |
| | TCACACCCCTTATCACATCCGCGCGGCATGCACCAGCAGCCAGGGCCCCTCATCCTGG |
| | ACCCACTGGCTTCCTGTGGAGACGCCGGAGGGAGTGCCCCTGGGCCCCCCTGAGAACA |
| | TTAGTGCTACGCGGAATGGGAGCCAGGCCTTCGTGCATTGGCAAGAGCCCCGGGCGCC |
| | CCTGCAGGGTACCCTGTTAGGGTACCGGCTGGCGTATCAAGGCCAGGACACCCCAGAG |
| | GTGCTAATGGACATAGGGCTAAGGCAAGAGGTGACCCTGGAGCTGCAGGGGGACGGGT |
| | CTGTGTCCAATCTGACAGTGTGTGTGGCAGCCTACACTGCTGCTGGGGATGGACCCTG |
| | GAGCCTCCCAGTACCCCTGGAGGCCTGGCGCCCAGTGAAGGAACCTTCAACTCCTGCC |
| | TTCTCGTGGCCCTGGTGGTATCTCGAG |
| | ORF Start at 1 ORF Stop: end of sequence |
| | SEQ ID NO: 170 415 aa MW at 45089.2kD |
| NOV48d, | KLEESPFVGNPGNITGARGLTGTLRCQLQVQGEPPEVHWLRDGQILELADSTQTQVPL |
| 17557413 | |
| Protein | GEGEQDDWIVVSQLRITSLQLSDTGQYQCLVFLGHQTFVSQPGYVGLEGLRYFLEERE |
| Sequence | |
| | DRTVAANTRFNLSCQAQGRPEPVDLLWLQDAVPLATAPGHGPQRSLHVPGLNKTSSFS |
| | CEAHNAKGVTTSRTATITVLPQQPRNLHLVSRQPTELEVAWTPGLSGIYPLTHCTLQA |
| | VLSDDGMGIQAGELDPPEFPLTSQASVPPHQLRLGSLHPHTPYHIRAACTSSQGPSSW |
| | THWLPVETPEGVPLGPRENISATRNGSQAFVHWQFPRAPLQGTLLGYRLAYQGQDTPE |
| | VLMDTGLRQEVTLELQGDGSVSNLTVCVAAYTAAGDGRWSLPVRLEAWRPVKEPSTPA |
| | FSWPWWYLE |
| | SEQ ID NO: 171 1191 bp |
| NOV48c, | AAGCTTGAAGAAAGTCCCTTCGTGGGCAACCCAGGGAATATCACAGGTGCCCGGGGAC |
| 172557493 | |
| DNA | TCACGGGCACCCTTCGGTGTCAGCTCCAGGTTCAGGGAGAGCCCCCCGAGGTACATTG |
| Sequence | |
| | GCTTCGGGATGGACAGATCCTGGAGCTCGCGGACAGCACCCAGACCCAGGTGCCCCTG |
| | GGTGAGGATGAACAGGATGACTGGATAGTGGTCAGCCAGCTCAGAATCACCTCCCTGC |
| | AGCTTTCCGACACGGGACAGTACCAGTGTTTGGTGTTTCTGGGACATCAGACCTTCGT |
| | GTCCCAGCCTGGCTATGTTGGGCTGGACGGCTTGCCTTACTTCCTGGAGGAGCCCGAA |
| | GACAGGACTGTGGCCGCCAACACCCCCTTCAACCTGAGCTGCCAAGCTCAGGGACCCC |
| | CAGAGCCCGTGGACCTACTCTGGCTCCAGGATGCTGTCCCCCTGGCCACGGCTCCAGG |
| | TCACGGCCCCCAGCGCAGCCTGCATGTTCCAGTGCTCCCCCAGCAGCCCCGTAACCTC |
| | CACCTGGTCTCCCGCCAACCCACGGAGCTGGAGGTGGCTTGGACTCCAGGCCTGAGCG |
| | GCATCTACCCCCTGACCCACTGCACCCTGCAGGCTGTGCTGTCAGACGATGGGATGGG |
| | CATCCAGGCGGGAGAACCAGACCCCCCAGAGGAGCCCCTCACCTCGCAAGCATCCGTG |
| | CCCCCCCATCAGCTTCGGCTAGGCAGCCTCCATCCTCACACCCCTTATCACATCCGCG |
| | TGGCATGCACCAGCAGCCAGGGCCCCTCATCCTGGACCCACTGGCTTCCTGTGGAGAC |
| | GCCGGAGGGAGTGCCCCTGGGCCCCCCTGAGAACATTAGTGCTACGCGGAATGGGAGC |
| | ACCGGCTGGCGTATCAAGGCCAGGACACCCCAGAGGTGCTAATGGACATAGGGCTAAG |
| | GCAAGAGGTGACCCTGGAGCTGCAGGGGGACGGGTCTGTGTCCAATCTGACAGTGCGT |
| | GTGGCAGCCTACACTGCTGCTGGGGATGGACCCTGGAGCCTCCCAGTACCCCTGGAGG |
| | CCTGGCGCCCAGGGCTAGCACAGCCAGTCCACCAGCTGGTGAAGGAACCTTCAACTCC |
| | TGCCTTCTCGTGGCCCTGGTGGTATCTCGAG |
| | ORF Start at 1 ORF Stop: end of sequence |
| | SEQ ID NO: 172 397 aa MW at 43406.3kD |
| NOV48e, | KLEESPFVGNPGNITGARGLTGTLRCQLQVQGEPPEVHWLRDGQILELADSTQTQVPL |
| 172557493 | |
| Protein | GEDEQDDWIVVSQLRITSLQLSDTGQYQCLVFLGHQTFVSQPGYVGLEGLPYFLEEPE |
| Sequence | |
| | DRTVAANTPFNLSCQAQGPPEPVDLLWLQDAVPLATAPGHGPQRSLHVPVLPQQPRNL |
| | HLVSRQPTELEVAWTPGLSGIYPLTHCTLQAVLSDDGMGTQAGEPDPPEEPLTSQASV |
| | PPHQLRLGSLHPHTPYHIRVACTSSQGPSSWTHWLPVETPEGVPLGPPENISATRNGS |
| | QAFVHWQEPRAPLQGTLLGYRLAYQGQDTPEVLMDIGLRQEVTLELQGDGSVSNLTVR |
| | VAAYTAAGDGPWSLPVPLEAWRPGQAQPVHQLVKEPSTPAFSWPWWYLE |
| | SEQ ID NO: 173 1272 bp |
| NOV48f | AAGCTTGAAGAAAGTCCCTTCGTGGGCAACCCAGGGAATATCACAGGTGCCCGTGAGT |
| 172557606 | |
| DNA | CCCCGGGCACCCTTCGGTGTCAGCTCCAGGTTCAGGGAGAGCCCCCCGAGGTACATTG |
| Sequence | |
| | GCTTCGGGATGGACAGATCCTGGAGCTCGCGGACAGCACCCAGACCCAGGTGCCCCTG |
| | GGTGAGGATGAACAGGATGACTGGATAGTGGTCAGCCAGCTCAGAATCACCTCCCTGC |
| | AGCTTTCCGACACGGGACAGTACCAGTGTTTGGTGTTTCTGGGACATCAGACCTTCGT |
| | GTCCCAGCCTGGCTATGTTGGGCTGGAGGGCTTGCCTTACTTCCTGGAGGAGCCCGAA |
| | GACAGGACTGTGGCCGCCAACACCCCCTTCAACCTGAGCTGCCAAGCTCAGGGACCCC |
| | CAGAGCCCGTGGACCTACTCTGGCTCCAGGATGCTGTCCCCCTGGCCACGGCTCCAGG |
| | TCACGGCCCCCAGCGCAGCCTGCATGTTCCAGGGCTGAACAAGACATCCTCTTTCTCC |
| | TGCGAAGCCCATAACGCCAAGGGGGTCACCACATCCCGCACAGCCACCATCACAGTGC |
| | TCCCCCAGCAGCCCCGTAACCTCCACCTGGTCTCCCGCCAACCCACGGAGCTGGAGGT |
| | GGCTTGGACTCCAGGCCTGAGCGGCATCTACCCCCTGACCCACTGCACCCTGCAGGCT |
| | GTGCTGTCAGACGATGGGATGGGCATCCAGGCGGGAGAACCAGACCCCCCAGAGGAGC |
| | CCCTCACCTCGCAAGCATCCGTGCCCCCCCATCAGCTTCGGCTAGGCAGCCTCCATCC |
| | TCACACCCCTTATCACATCCGCGTGGCATGCACCAGCAGCCAGGGCCCCTCATCCTGG |
| | ACCCACTGGCTTCCTGTGGAGACGCCGGAGGGAGTGCCCCTGGGCCCCCCTGAGAACA |
| | TTAGTGCTACGCGGAATGGGAGCCAGGCCTTCGTGCATTGGCAAGAGCCCCGGGCGCC |
| | CCTGCAGGGTACCCTGTTAGGGTACCGGCTGGCGTATCAAGGCCAGGACACCCCAGAG |
| | GTGCTAATGGACATAGGGCTAAGGCAAGAGGTGACCCTGGAGCTGCAGGGGGACGGGT |
| | CTGTGTCCAATCTGACAGTGTGTGTGGCAGCCTACACTGCTGCTGGGGATGGACCCTG |
| | GAGCCTCCCAGTACCCCTGGAGGCCTGGCGCCCAGGGCAAGCACAGCCAGTCCACCAG |
| | CTGGTGAAGGAACCTTCAACTCCTGCCTTCTCGTGGCCCTGGTGGTATCTCGAG |
| | ORF Start: at 1 ORF Stop: end of sequence |
| | SEQ ID NO: 174 424 aa MW at 46160.3kD |
| NOV48f, | KLEESPFVGNPGNITGARESPGTLRCQLQVQGEPPEVHWLRDGQILELADSTQTQVPL |
| 172557606 | |
| Protein | GEDEQDDWIVVSQLRITSLQLSDTGQYQCLVFLGHQTFVSQPGYVGLEGLPYFLEERE |
| Sequence | |
| | DRTVAANTPFNLSCQAQGPPEPVDLLWLQDAVPLATAPGHGPQRSLHVPGLNKTSSFS |
| | CEAHNAKGVTTSRTATITVLPQQPRNLHLVSRQPTELEVAWTPGLSGIYPLTHCTLQA |
| | THWLPVETPEGVPLGPPENISATRNGSQAFVHWQEPRAPLQGTLLGYRLAYQGQDTPE |
| | VLMDIGLRQEVTLELQGDGSVSNLTVCVAAYTAAGDGPWSLPVPLEAWRPGQAQPVHQ |

[0577] Sequence comparison of the above protein sequences yields the following sequence relationships shown in Table 48B.

TABLE 48B
Comparison of NOV48a against NOV48b through NOV48f

| | NOV48a Residues/ | Identities/Similarities |
|---|---|---|
| Protein Sequence | Match Residues | for the Matched Region |
| NOV48b | 435 . . . 894 | 400/460 (86%) |
| | 236 . . . 695 | 401/460 (86%) |
| NOV48c | 1 . . . .894 | 810/894 (90%) |
| | 1 . . . .867 | 810/894 (90%) |
| NOV48d | 33 . . . 453 | 407/421 (96%) |
| | 3 . . . 414 | 408/421 (96%) |
| NOV48e | 33 . . . 453 | 390/421 (92%) |
| | 3 . . . 396 | 392/421 (92%) |
| NOV48f | 33 . . . 453 | 415/421 (98%) |
| | 3 . . . 423 | 417/421 (98%) |

[0578] Further analysis of the NOV48a protein yielded the following properties shown in Table 48C.

TABLE 48C
Protein Sequence Properties NOV48a

| | |
|---|---|
| PSort | 0.4600 probability located in plasma membrane; 0.1129 |
| analysis: | probability located in microbody (peroxisome); 0.1000 |
| | probability located in endoplasmic reticulum (membrane); |
| | 0.1000 probability located in endoplasmic reticulum (lumen) |
| SignalP | Cleavage site between residues 33 and 34 |
| analysis: | |

[0579] A search of the NOV48a protein against the Geneseq database, a proprietary database that contains sequences published in patents and patent publication, yielded several homologous proteins shown in Table 48D.

TABLE 48D
Geneseq Results for NOV48a

| | | | Identities/ | |
|---|---|---|---|---|
| | | | Similari- | |
| | | NOV48a | ties | |
| | Protein/ | Residues/ | for the | |
| Geneseq | Organism/Length | Match | Matched | Expect |
| Identifier | [Patent #, Date] | Residues | Region | Value |
| AAB90763 | Human shear stress- | 1 . . . 894 | 894/894 | 0.0 |
| | response protein | 1 . . . 894 | (100%) | |
| | SEQ ID NO: 26 - | | 894/894 | |
| | Homo sapiens, | | (100%) | |
| | 894 aa. | | | |
| | [WO200125427-A1, | | | |
| | 12 APR. 2001] | | | |
| AAR85753 | Human axl receptor - | 1 . . . 894 | 891/894 | 0.0 |
| | Homo sapiens, | 1 . . . 894 | (99%) | |
| | 894 aa. | | 892/894 | |
| | [U.S. Pat. 5468634-A, | | (99%) | |
| | 21 NOV. 1995] | | | |
| ABG22182 | Novel human | 1 . . . 894 | 887/895 | 0.0 |
| | diagnostic protein | 53 . . . 947 | (99%) | |
| | #22173 -Homo | | 890/895 | |
| | sapiens, | | (99%) | |
| | 947 aa. | | | |
| | [WO200175067-A2, | | | |
| | 11 OCT. 2001] | | | |
| ABG22182 | Novel human | 1 . . . 894 | 887/895 | 0.0 |
| | diagnostic protein | 53 . . . 947 | (99%) | |
| | #22173 -Homo | | 890/895 | |
| | sapiens, | | (99%) | |
| | 947 aa. | | | |
| | [WO200175067-A2, | | | |
| | 11 OCT. 2001] | | | |
| AAU84262 | Human endometrial | 1 . . . .894 | 882/894 | 0.0 |
| | cancer related | 1 . . . .885 | (98%) | |
| | protein, AXL - | | 883/894 | |
| | Homo sapiens, 885 aa. | | (98%) | |
| | [WO200209573-A2, | | | |
| | 07 FEB. 2002] | | | |

[0580] In a BLAST search of public sequence datbases, the NOV48a protein was found to have homology to the proteins shown in the BLASTP data in Table 48E.

TABLE 48E
Public BLASTP Results for NOV48a

| | | | Identities/ | |
|---|---|---|---|---|
| | | | Similari- | |
| | | NOV48a | ties | |
| Protein | | Residues/ | for the | |
| Accession | Protein/ | Match | Matched | Expect |
| Number | Organism/Length | Residues | Portion | Value |
| A41527 | protein-tyrosine | 1 . . . 894 | 891/894 | 0.0 |
| | kinese | 1 . . . 894 | (99%) | |
| | (EC 2.7.1.112) axl | | 892/894 | |
| | precursor, major | | (99%) | |
| | splice form - | | | |
| | human, 894 aa. | | | |
| P30530 | Tyrosine-protein | 8 . . . 894 | 887/887 | 0.0 |
| | kinase receptor | 1 . . . 887 | (100%) | |
| | UFO precursor | | 887/887 | |
| | (EC 2.7.1.112) | | (100%) | |
| | (AXL oncogene) - | | | |
| | Homo sapiens | | | |
| | (Human), 887 aa. | | | |
| Q8V1A0 | Rat Axl longform - | 8 . . . 894 | 781/888 | 0.0 |
| | Rattus norvegicus | 1 . . . 888 | (87%) | |
| | (Rat), 888 aa. | | 816/888 | |
| | | | (90%) | |
| Q00993 | Tyrosine-protein | 8 . . . 894 | 779/888 | 0.0 |
| | kinase receptor | 1 . . . 888 | (87%) | |
| | UFO precursor | | 814/888 | |
| | (EC 2.7.1.112) | | (90%) | |
| | (Adhesion-related | | | |
| | kinase) - Mus | | | |
| | musculus (Mouse), | | | |
| | 888 aa. | | | |
| Q8V199 | Rat Axl shortform - | 8 . . . 894 | 776/888 | 0.0 |
| | Rattus norvegicus | 1 . . . 879 | (87%) | |
| | (Rat). 879 aa. | | 809/888 | |
| | | | (90%) | |

[0581] PFam analysis predicts that the NOV48a protein contains the domains shown in the Table 48F.

TABLE 48F
Domain Analysis of NOV48a

| | NOV48a | Identities/Similarities | Expect |
|---|---|---|---|
| Pfam Domain | Match Region | for the Matched Region | Value |
| ig | 49 . . . 119 | 18/73(25%) | 1.2e-07 |
| | | 48/73(66%) | |
| ig | 153 . . . 207 | 8/59(14%) | 0.053 |
| | | 37/59(63%) | |
| fn3 | 225 . . . 321 | 21/100(21%) | 7.6e-05 |
| | | 68/100(68%) | |
| fn3 | 334 . . . 418 | 20/87(23%) | 5.1e-10 |
| | | 62/87(71%) | |
| pkinase | 536 . . . 803 | 80/303 (26%) | 1.9e-71 |
| | | 212/303 (70%) | |

### Example 49

[0582] The NOV49 clone was analyzed, and the nucleotide and encoded polypeptide sequences are shown in Table 49A.

TABLE 49A
NOV49 Sequence Analysis

| | |
|---|---|
| | SEQ ID NO 175 406 bp |
| NOV49a. | GGAAGATGGCGGAACAGGCTACCAAGTCCGTGCTGTTTGTGTGTCTGGGTAACATTTG |
| CG59582-03 | |
| DNA | TCGATCACCCATTGCAGAAGCAGTTTTCAGGAAACTTGTAACCGATCAAAACATCTCA |
| Sequence | |
| | GAGAATATTACCAAAGAAGATTTTGCCACATTTGATTATATACTATGTATGGATGAAA |
| | GCAATCTGAGAGATTTGAATAGAAAAAGTAATCAAGTTAAAACCTGCAAAGCTAAAAT |
| | TGAACTACTTGGGAGCTATGATCCACATAAACAACTTATTATTGAAGATCCCTATTAT |
| | GGGAATGACTCTGACTTTGAGACGGTGTACCAGCAGTGTGTCAGGTGCTGCAGAGCGT |
| | TCTTGGAGAAGGCCCACTGAGGCAGGTTCGTGCCCTGCTGCGGCCAGCCTGACTAGAC |
| | ORF Start: at 9 ORF Stop: TGA at 366 |
| | SEQ ID NO: 176 119 aa MW at 13669.4kD |
| NOV49a. | AEQATKSVLFVCLGNICRSRIAEAVFRKLVTDQNISENITKEDFATFDYILCMDESNL |
| CG59582-03 | |
| Protein | RDLNRKSNQVKTCKAKIELLGSYDPQKQLIIEDPYYGNDSDPETVYQQCVRCCRAFLE |
| Sequence | |
| | KAH |

[0583] Further analysis of the NOV49a protein yielded the following properties shown in Table 49B.

TABLE 49B
Protein Sequence Properties NOV49a

| | |
|---|---|
| PSort | 0.5500 probability located in endoplasmic reticulum |
| analysis | (membrane); 0.1900 probability |
| | located in lysosome (lumen). |
| | 0.1000 probability located in endoplasmic reticulum |
| | (lumen); 0.1000 probability located in outside |
| SignalP | Cleavage site between residues 25 and 26 |
| analysis: | |

[0584] A search of the NOV49a protein against the Geneseq database, a proprietary database that contains sequences published in patents and patent publication, yielded several homologous proteins shown in Table 49C.

TABLE 49C
Geneseq Results for NOV49a

| | | NOV49a | | |
|---|---|---|---|---|
| | | Residues/ | Identities/ | |
| Geneseq | Protein/Organism/Length | Match | Similarities for the | Expect |
| Identifier | [Patent #, Date] | Residues | Matched Region | Value |
| AAU30795 | Novel human secreted protein #1286- | 1 . . . 119 | 103/170(60%) | 1e-43 |
| | Homo sapiens, 246 aa. [WO200179449- | 77 . . . 246 | 106/170(61%) | |
| | A2, 25-OCT-2001] | | | |
| AAU30794 | Novel human secreted protein #1285 - | 15 . . . 87 | 55/90(61%) | 3e-20 |
| | Homo sapiens, 102 aa. [WO200179449- | 13 . . . 102 | 61/90(67%) | |
| | A2, 25-OCT-2001] | | | |
| AAE05979 | Zygosaceharomyces rouxii PPPase 2 | 7 . . . 116 | 55/152(36%) | 2e-18 |
| | protein-Zygosaceharomyces rouxii, 160 | 8 . . . 157 | 74/152(48%) | |
| | aa. [WO200 153306-A2, 26-JUL-2001] | | | |
| AAE05978 | Zygosaccharomyces rouxii PPPase 1 | 7 . . . 116 | 53/152(34%) | 3e-17 |
| | protein-Zygosaccharomyces | 8 . . . 157 | 73/152(47%) | |
| | rouxii, 160 aa. [WO200153306-A2, | | | |
| | 26-JUL-2001] | | | |
| ABB71773 | Drosophila melanogaster polypeptide | 4 . . . 94 | 47/132(35%) | 1e-11 |
| | SEQ ID NO 42111 - Drosophila | 293 . . . 422 | 63/132(47%) | |
| | melanogaster, 424 aa. [WO200171042- | | | |
| | A2. 27-SEP-2001] | | | |

[0585] In a BLAST search of public sequence datbases, the NOV49a protein was found to have homology to the proteins shown in the BLASTP data in Table 49D.

TABLE 49D
Public BLASTP Results for NOV49a

| | | NOV49a | Identities/ | |
|---|---|---|---|---|
| Protein | | Residues/ | Similarities for | |
| Accession | | Match | the Matched | Expect |
| Number | Protein/Organism/Length | Residues | Portion | Value |
| A38148 | protein-tyrosine-phosphatase(EC | 1 . . . 119 | 119/157(75%) | 1e-59 |
| | 3.1 3.48), low molecular weight, splice | 2 . . . 158 | 119/157(75%) | |
| | form f [validated] - human. 158 aa. | | | |
| AAH07422 | Acid phosphatase 1, soluble - Homo | 1 . . . 119 | 119/157(75%) | 1e-59 |
| | sapiens(Human), 158 aa. | 2 . . . 158 | 119/157(75%) | |
| P24667 | Red cell acid phosphatase 1, isozyme S | 1 . . . 119 | 119/157(75%) | 1e-59 |
| | (EC 3.1.3.2)(ACPI)(Low molecular | 1 . . . 157 | 119/157(75%) | |
| | weight phosphotyrosine protein | | | |
| | phosphatase)(EC 3.1.3.48)(Adipocyte | | | |
| | acid phosphatase, isozyme beta) - Homo | | | |
| | sapiens(Human), 157 aa. | | | |
| P24666 | Red cell acid phosphatase 1, isozyme F | 1 . . . 119 | 119/157(75%) | 1e-59 |
| | (EC 3.1.3.2)(ACPI)(Low molecular | 1 . . . 157 | 119/157(75%) | |
| | weight phosphotyrosine protein | | | |
| | phosphatase)(EC 3.1.3.48)(Adipocyte | | | |
| | acid phosphatase, isozyme alpha) - Homo | | | |
| | sapiens(Human), 157 aa. | | | |
| A53874 | protein-tyrosine-phosphatase(EC 3.1.3.48) | 1 . . . 119 | 107/157(68%) | 2e-54 |
| | isoenzyme AcPI - rat, 157 aa. | 1 . . . 157 | 114/157(72%) | |

[0586] PFam analysis predicts that the NOV49a protein contains the domains shown in the Table 49E.

TABLE 49E
Domain Analysis of NOV49a

| Pfam | NOV49a | Identities/Similarities | Expect |
|---|---|---|---|
| Domain | Match Region | for the Matched Region | Value |
| LMWPc | 6 . . . 117 | 46/162(28%) | 4.6e-35 |
| | | 108/162(67%) | |

### Example B

[0587] Sequencing Methodology and Identification of NOVX Clone

[0588] 1. GeneCalling™ Technology: This is a proprietary method of performing differential gene expression profiling between two or more samples developed at CuraGen and described by Shimkets. et al., “Gene expression analysis by transcript profiling coupled to a gene database query” Nature Biotechnology 17:198-803 (1999). cDNA was derived from various human samples representing multiple tissue types, normal and diseased states, physiological states, and developmental states from different donors. Samples were obtained as whole tissue, primary cells or tissue cultured primary cells or cell lines. Cells and cell lines may have been treated with biological or chemical agents that regulate gene expression, for example, growth factors, chemokines or steroids. The cDNA thus derived was then digested with up to as many as 120 pairs of restriction enzymes and pairs of linker-adaptors specific for each pair of restriction enzymes where ligated to the appropriate end. The restriction digestion generates a mixture of unique cDNA gene fragments. Limited PCR amplification is performed with primers homologous to the linker adapter sequence where one primer is biotinylated and the other is fluorescently labeled. The doubly labeled material is isolated and the fluorescently labeled single strand is resolved by capillary gel electrophoresis. A computer algorithm compares the electropherograms from an experimental and control group for each of the restriction digestions. This and additional sequence-derived information is used to predict the identity of each differentially expressed gene fragment using a variety of genetic databases. The identity of the gene fragment is confirmed by additional, gene-specific competitive PCR or by isolation and sequencing of the gene fragment.

[0589] 2. SeqCalling™ Technology: cDNA was derived from various human samples representing multiple tissue types, normal and diseased states, physiological states, and developmental states from different donors. Samples were obtained as whole tissue, primary cells or tissue cultured primary cells or cell lines. Cells and cell lines may have been treated with biological or chemical agents that regulate gene expression, for example, growth factors, chemokines or steroids. The cDNA thus derived was then sequenced using CuraGen's proprietary SeqCalling technology. Sequence traces were evaluated manually and edited for corrections if appropriate. cDNA sequences from all samples were assembled together, sometimes including public human sequences, using bioinformatic programs to produce a consensus sequence for each assembly. Each assembly is included in CuraGen Corporation's database. Sequences were included as components for assembly when the extent of identity with another component was at least 95% over 50 bp. Each assembly represents a gene or portion thereof and includes information on variants, such as splice forms single nucleotide polymorphisms (SNPs), insertions, deletions and other sequence variations.

[0590] 3. PathCalling™ Technology: The NOVX nucleic acid sequences are derived by laboratory screening of cDNA library by the two-hybrid approach. cDNA fragments covering either the full length of the DNA sequence, or part of the sequence, or both, are sequenced. In silico prediction was based on sequences available in CuraGen Corporation's proprietary sequence databases or in the public human sequence databases, and provided either the full length DNA sequence, or some portion thereof.

[0591] The laboratory screening was performed using the methods summarized below:

[0592] cDNA libraries were derived from various human samples representing multiple tissue types, normal and diseased states, physiological states, and developmental states from different donors. Samples were obtained as whole tissue, primary cells or tissue cultured primary, cells or cell lines. Cells and cell lines may have been treated with biological or chemical agents that regulate gene expression, for example, growth factors, chemokines or steroids. The cDNA thus derived was then directionally cloned into the appropriate two-hybrid vector (Gal4-activation domain (Gal4-AD) fusion). Such cDNA libraries as well as commercially available cDNA libraries from Clontech (Palo Alto, Calif.) there then transferred from E.coli into a CuraGen Corporation proprietary yeast strain (disclosed in U.S. Pat. Nos. 6.0,57,101 and 6,083,693, incorporated herein by reference in their entireties).

[0593] Gal4-binding domain (Gal4-BD) fusions of a CuraGen Corporation proprietary library of human sequences was used to screen multiple Gal4-AD fusion cDNA libraries resulting in the selection of yeast hybrid diploids in each of which the Gal4-AD fusion contains an individual cDNA. Each sample was amplified using the polymerase chain reaction (PCR) using non-specific primers at the cDNA insert boundaries. Such PCR product was sequenced; sequence traces were evaluated manually and edited for corrections if appropriate. cDNA sequences from all samples were assembled together, sometimes including public human sequences, using bioinformatic programs to produce a consensus sequence for each assembly. Each assembly is included in CuraGen Corporation's database. Sequences were included as components for assembly when the extent of identity with another component was at least 95% over 50 bp. Each assembly represents a gene or portion thereof and includes information on variants, such as splice forms single nucleotide polymorphisms (SNPs), insertions, deletions and other sequence variations.

[0594] Physical clone: the cDNA fragment derived by the screening procedure, covering the entire open reading frame is, as a recombinant DNA, cloned into pACT2 plasmid (Clontech) used to make the cDNA library. The recombinant plasmid is inserted into the host and selected by the yeast hybrid diploid generated during the screening procedure by the mating of both CuraGen Corporation proprietary yeast strains N106′ and YULH (U.S. Pat. Nos. 6,057,101 and 6,083,693).

[0595] 4. RACE: Techniques based on the polymerase chain reaction such as rapid amplification of cDNA ends (RACE), were used to isolate or complete the predicted sequence of the cDNA of the invention. Usually multiple clones were sequenced from one or more human samples to derive the sequences for fragments. Various human tissue samples from different donors were used for the RACE reaction. The sequences derived from these procedures were included in the SeqCalling Assembly process described in preceding paragraphs.

[0596] 5. Exon Linking: The NOVX target sequences identified in the present invention were subjected to the exon linking process to confirm the sequence. PCR primers were designed by starting at the most upstream sequence available, for the forward primer, and at the most downstream sequence available for the reverse primer. In each case, the sequence was examined, walking inward from the respective termini toward the coding sequence, until a suitable sequence that is either unique or highly selective was encountered, or, in the case of the reverse primer, until the stop codon was reached. Such primers were designed based on in silico predictions for the full length cDNA, part (one or more exons) of the DNA or protein sequence of the target sequence, or by translated homology of the predicted exons to closely related human sequences from other species. These primers were then employed in PCR amplification based on the following pool of human cDNAs: adrenal gland, bone marrow, brain—amygdala, brain—cerebellum, brain—hippocampus, brain—substantia nigra, brain—thalamus, brain—whole, fetal brain, fetal kidney, fetal liver, fetal lung, heart, kidney, lymphoma—Raji, mammary gland, pancreas, pituitary gland, placenta, prostate, salivary gland, skeletal muscle, small intestine, spinal cord, spleen, stomach, testis, thyroid, trachea, uterus. Usually the resulting amplicons were gel purified, cloned and sequenced to high redundancy. The PCR product derived from exon linking was cloned into the pCR2.1 vector from Invitrogen. The resulting bacterial clone has an insert covering the entire open reading frame cloned into the pCR2.1 vector. The resulting sequences from all clones were assembled with themselves, with other fragments in CuraGen Corporation's database and with public ESTs. Fragments and ESTs were included as components for an assembly when the extent of their identity with another component of the assembly was at least 95% over 50 bp. In addition, sequence traces were evaluated manually and edited for corrections if appropriate. These procedures provide the sequence reported herein.

[0597] 6. Physical Clone: Exons were predicted by homology and the intron/exon boundaries were determined using standard genetic rules. Exons were further selected and refined by means of similarity determination using multiple BLAST (for example, tBlastN, BlastX, and BlastN) searches, and, in some instances GeneScan and Grail. Expressed sequences from both public and proprietary databases were also added when available to further define and complete the gene sequence. The DNA sequence was then manually corrected for apparent inconsistencies thereby obtaining the sequences encoding the full-length protein.

[0598] The PCR product derived by exon linking, covering the entire open reading frame, was cloned into the pCR2.1 vector from Invitrogen to provide clones used for expression and screening purposes.

[0599] 7. Construction of the mammalian expression vector pCEP4/Sec. The oligonucleotide primers. pSec-V5-His Forward (5′-CTCGTC CTCGAG GGT AAG CCT ATC CCT AAC-3′)(SEQ ID NO: 369) and the pSec-V5-His Reverse (5′-CTCGTC GGGCCCCTGATCAGCGGGTTTTAAAC-3′)(SEQ ID NO: 370), were designed to amplify a fragment from the pcDNA3.1-V5His (Invitrogen, Carlsbad, Calif.) expression vector. The PCR product was digested with XhoI and ApaI and ligated into the XhoI/ApaI digested pSecTag2 B vector (Invitrogen, Carlsbad Calif.). The correct structure of the resulting vector, pSecV5His, was verified by DNA sequence analysis. The vector pSecV5His was digested with PmeI and NheI, and the PmeI-NheI fragment was ligated into the BamHI/Klenow and NheI treated vector pCEP4 (Invitrogen, Carlsbad, Calif.). The resulting vector was named as pCEP4/Sec.

[0600] Table 50 represents the expression of CG59325-02 in human embryonic kidney 293 cells. A 1.2 kb BamHI-XhoI fragment containing the CG59325-02 sequence was subcloned into BamHI-XhoI digested pCEP4/Sec to generate plasmid 998. The resulting plasmid 998 was transfected into 293 cells using the LipofectaminePlus reagent following the manufacturer's instructions (Gibco/BRL). The cell pellet and supernatant were harvested 72 h post transfection and examined for CG59325-02 expression by Western blot (reducing conditions) using an anti-V5 antibody. Table 50 shows that CG59325-02 is expressed as a 50 kDa protein secreted by 293 cells.

[image]

[0601] 8. Construction of the mammalian expression vector pCEP4/Sec. The oligonucleotide primers, pSec-V5-His Forward (5′-CTCGTC CTCGAG GGT AAG CCT ATC CCT AAC-3) )(SEQ ID NO: 369) and the pSec-V5-His Reverse (5′-CTCGTC GGGCCCCTGATCAGCGGGTTTAAAC-3′)(SEQ ID NO: 370), were destined to amplify a fragment from the pcDNA-3.1-V5His (Invitrogen, Carlsbad, Calif.) expression vector. The PCR product was digested with XhoI and ApaI and ligated into the XhoI/ApaI digested pSecTag2 B vector (Invitrogen, Carlsbad Calif.). The correct structure of the resulting vector, pSecV5His, was verified by DNA sequence analysis. The vector pSecV5His was digested with PmeI and NheI, and the PmeI-NheI fragment was ligated into the BamHI/Klenow and NheI treated vector pCEP4 (Invitrogen, Carlsbad, Calif.). The resulting vector was named as pCEP4/Sec.

[0602] Table 51 represents the CG57209-03 protein secreted by 293 cells. A 1.7 kb BamHI-XhoI fragment containing the CG57209-03 sequence was subcloned into BamHI-XhoI digested pCEP4/Sec to generate plasmid 820. The resulting plasmid 820 was transfected into 293 cells using the LipofectaminePlus reagent following the manufacturer's instructions (Gibco/BRL). The cell pellet and supernatant were harvested 72 h post transfection and examined for CG57209-03 expression by Western blot (reducing conditions) using an anti-V5 antibody. Table 51 shows that CG57209-03 is expressed as a 85 kDa protein secreted by 293 cells.

[image]

### Example C

[0603] Quantitative Expression Analysis of Clones in Various Cells and Tissues

[0604] The quantitative expression of various clones was assessed using microtiter plates containing RNA samples from a variety of normal and pathology-derived cells, cell lines and tissues using real time quantitative PCR (RTQ PCR). RTQ PCR was performed on an Applied Biosystems ABI PRISM-® 7700 or an ABI PRISM® 7900 HT Sequence Detection System. Various collections of samples are assembled on the plates, and referred to as Panel 1 (containing normal tissues and cancer cell lines). Panel 2 (containing samples derived from tissues from normal and cancer sources), Panel 3 (containing cancer cell lines), Panel 4 (containing cells and cell lines from normal tissues and cells related to inflammatory conditions), Panel 5D/5I (containing human tissues and cell lines with an emphasis on metabolic diseases), AI_comprehensive_panel (containing normal tissue and samples from autoinflammatory diseases), Panel CNSD.01 (containing samples from normal and diseased brains) and CNS_neurodegeneration_panel (containing samples from normal and Alzheimer's diseased brains).

[0605] RNA integrity from all samples is controlled for quality by visual assessment of agarose gel electropherograms using 28S and 18S ribosomal RNA staining intensity ratio as a guide (2:1 to 2.5:1 28s:18s) and the absence of low molecular weight RNAs that would be indicative of degradation products. Samples are controlled against genomic DNA contamination by RTQ PCR reactions run in the absence of reverse transcriptase using probe and primer sets designed to amplify across the span of a single exon.

[0606] First, the RNA samples were normalized to reference nucleic acids such as constitutively expressed genes (for example, β-actin and GAPDH). Normalized RNA (5 ul) was converted to cDNA and analyzed by RTQ-PCR using One Step RT-PCR Master Mix Reagents (Applied Biosystems; Catalog No. 4309169) and gene-specific primers according to the manufacturer's instructions.

[0607] In other cases, non-normalized RNA samples were converted to single strand cDNA (sscDNA) using Superscript II (Invitrogen Corporation; Catalog No. 18064-147) and random hexamers according to the manufacturer's instructions. Reactions containing up to 10 μg of total RNA were performed in a volume of 20 μl and incubated for 60 minutes at 42° C. This reaction can be scaled up to 50 μg of total RNA in a final volume of 100 μl. sscDNA samples are then normalized to reference nucleic acids as described previously, using 1× TaqMan® Universal Master mix (Applied Biosystems; catalog No. 4324020), following the manufacturer's instructions.

[0608] Probes and primers ere designed for each assay according to Applied Biosystems Primer Express Software package (version I for Apple Computer's Macintosh Power PC) or a similar algorithm using the target sequence as input. Default settings were used for reaction conditions and the following parameters were set before selecting primers: primer concentration=250 nM, primer melting temperature (Tm) range=58°-60° C., primer optimal Tm=59° C. maximum primer difference=2° C. probe does not have 5′G, probe Tm must be 10° C. greater than primer Tm, amplicon size 75 bp to 100 bp. The probes and primers selected (see below) were synthesized by Synthegen (Houston, Tex. USA). Probes were double purified by HPLC to remove uncoupled dye and evaluated by mass spectroscopy to verify coupling of reporter and quencher dyes to the 5′ and 3′ ends of the probe, respectively. Their final concentrations were: forward and reverse primers. 900 nM each, and probe, 200 nM.

[0609] PCR conditions: When working with RNA samples, normalized RNA from each tissue and each cell line was spotted in each well of either a 96 well or a 384-well PCR plate (Applied Biosystems). PCR cocktails included either a single gene specific probe and primers set, or two multiplexed probe and primers sets (a set specific for the target clone and another gene-specific set multiplexed with the target probe). PCR reactions were set up using TaqMan® One-Step RT-PCR Master Mix (Applied Biosystems, Catalog No. 4313803) following manufacturer's instructions. Reverse transcription was performed at 48° C. for 30 minutes followed by amplification/PCR cycles as follows: 95° C. 10 min, then 40 cycles of 95° C. for 15 seconds, 60° C. for 1 minute. Results were recorded as CT values (cycle at which a given sample crosses a threshold level of fluorescence) using a log scale, with the difference in RNA concentration between a given sample and the sample with the lowest CT value being represented as 2 to the power of delta CT. The percent relative expression is then obtained by taking the reciprocal of this RNA difference and multiplying by 100.

[0610] When working faith sscDNA samples, normalized sscDNA was used as described previously for RNA samples. PCR reactions containing one or two sets of probe and primers were set up as described previously, using 1× TaqMan® Universal Master mix (Applied Biosystems; catalog No. 4324020), following the manufacturer's instructions. PCR amplification was performed as follows: 95° C. 10 min, then 40 cycles of 95° C. or 15 seconds, 60° C. for 1 minute. Results were analyzed and processed as described previously.

[0611] Panels 1, 1.1, 1.2, and 1.3D

[0612] The plates for Panels 1. 1.1, 1.2 and 1.3D include 2 control wells (genomic DNA control and chemistry control) and 94 wells containing cDNA from various samples. The samples in these panels are broken into 2 classes: samples derived from cultured cell lines and samples derived from primary normal tissues. The cell lines are derived from cancers of the following types: lung cancer, breast cancer, melanoma, colon cancer, prostate cancer, CNS cancer, squamous cell carcinoma, ovarian cancer, liver cancer, renal cancer, gastric cancer and pancreatic cancer. Cell lines used in these panels are snidely available through the American Type Culture Collection (ATCC), a repository for cultured cell lines, and were cultured using the conditions recommended by the ATCC. The normal tissues found on these panels are comprised of samples derived from all major organ systems from single adult individuals or fetuses. These samples are derived from the following organs: adult skeletal muscle, fetal skeletal muscle, adult heart, fetal heart, adult kidney, fetal kidney, adult liver, fetal liver, adult lung, fetal lung, various regions of the brain, the spleen, bone marrow, lymph node, pancreas, salivary gland, pituitary gland, adrenal gland, spinal cord, thymus, stomach, small intestine, colon, bladder, trachea, breast, ovary, uterus, placenta, prostate, testis and adipose.

[0613] In the results for Panels 1, 1.1, 1.2 and 1.3D, the following abbreviations are used:

[0614] ca.=carcinoma,

[0615] *=established from metastasis,

[0616] met=metastasis,

[0617] s cell var=small cell variant,

[0618] non-s=non-sm=non-small,

[0619] squam=squamous,

[0620] pl. eff=pl effusion=pleural effusion,

[0621] glio=glioma,

[0622] astro=astrocytoma, and

[0623] neuro=neuroblastoma.

[0624] General_screening_panel_v1.4, v1.5 and v1.6

[0625] The plates for Panels 1.4, 1.5, and 1.6 include 2 control wells (genomic DNA control and chemistry control) and 94 wells containing cDNA from various samples. The samples in Panels 1.4. 1.5, and 1.6 arc broken into 2 classes: samples derived from cultured cell lines and samples derived from primary normal tissues. The cell lines are derived from cancers of the following types: lung cancer, breast cancer, melanoma, colon cancer, prostate cancer, CNS cancer, squamous cell carcinoma, ovarian cancer, liver cancer, renal cancer, gastric cancer and pancreatic cancer. Cell lines used in Panels 1.4, 1.5. and 1.6 are widely available through the American Type Culture Collection (ATCC), a repository for cultured cell lines, and were cultured using the conditions recommended by the ATCC. The normal tissues found on Panels 1.4. 1.5. and 1.6 are comprised of pools of samples derived from all major organ Systems from 2 to 5 different adult individuals or fetuses. These samples are derived from the following organs: adult skeletal muscle, fetal skeletal muscle, adult heart, fetal heart, adult kidney, fetal kidney, adult liver, fetal liver, adult lung, fetal lung, various regions of the brain, the spleen, bone marrow, lymph node, pancreas, salivary gland, pituitary gland, adrenal gland, spinal cord, thymus, stomach, small intestine, colon, bladder, trachea, breast, ovary, uterus, placenta, prostate, testis and adipose. Abbreviations are as described for Panels 1, 1.1, 1.2, and 1.3D.

[0626] Panels 2D, 2.2, 2.3 and 2.4

[0627] The plates for Panels 2D, 2.2, 2.3 and 2.4 generally include 2 control wells and 94 test samples composed of RNA or cDNA isolated from human tissue procured by surgeons working in close cooperation with the National Cancer Institute's Cooperative Human Tissue Network (CHTN) or the National Disease Research Initiative (NDRI) or from Ardais or Clinomics). The tissues are derived from human malignancies and in cases where indicated many malignant tissues have “matched margins” obtained from noncancerous tissue just adjacent to the tumor. These are termed normal adjacent tissues and are denoted “NAT” in the results below. The tumor tissue and the “matched margins” are evaluated by two independent pathologists (the surgical pathologists and again by a pathologist at NDRI/CHTN/Ardais/Clinomics). Unmatched RNA samples from tissues without malignancy (normal tissues) were also obtained from Ardais or Clinomics. This analysis provides a gross histopathological assessment of tumor differentiation grade. Moreover, most samples include the original surgical pathology report that provides information regarding the clinical stage of the patient. These matched margins are taken from the tissue surrounding (i.e. immediately proximal) to the zone of surgery (designated “NAT”, for normal adjacent tissue, in Table RR). In addition. RNA and cDNA samples were obtained from various human tissues derived from autopsies performed on elderly people or sudden death victims (accidents, etc.). These tissues were ascertained to be free of disease and were purchased from various commercial sources such as Clontech (Palo Alto, Calif.), Research Genetics, and Invitrogen.

[0628] HASS Panel v 1.0

[0629] The HASS panel v 1.0 plates are comprised of 93 cDNA samples and two controls. Specifically. 81 of these samples are derived from cultured human cancer cell lines that had been subjected to serum starvation, acidosis and anoxia for different time periods as well as controls for these treatments. 3 samples of human primary cells. 9 samples of malignant brain cancer (4 medulloblastomas and 5 glioblastomas) and 2 controls. The human cancer cell lines are obtained from ATCC (American Type Culture Collection) and fall into the following tissue groups: breast cancer, prostate cancer, bladder carcinomas, pancreatic cancers and CNS cancer cell lines. These cancer cells are all cultured under standard recommended conditions. The treatments used (serum starvation, acidosis and anoxia) have been previously published in the scientific literature. The primary human cells were obtained from Clonetics (Walkersville, Md.) and were grown in the media and conditions recommended by Clonetics. The malignant brain cancer samples are obtained as part of a collaboration (Henry Ford Cancer Center) and are evaluated by a pathologist prior to CuraGen receiving the samples. RNA was prepared from these samples using the standard procedures. The genomic and chemistry control wells have been described previously.

[0630] ARDAIS Panel v 1.0

[0631] The plates for ARDAIS panel v 1.0 generally include 2 control wells and 22 test samples composed of RNA isolated from human tissue procured by surgeons working in close cooperation with Ardais Corporation. The tissues are derived from human lung malignancies (lung adenocarcinoma or lung squamous cell carcinoma) and in cases where indicated many malignant samples have “matched margins” obtained from noncancerous lung tissue just adjacent to the tumor. These matched margins are taken from the tissue surrounding (i.e. immediately proximal) to the zone of surgery (designated “NAT”, for normal adjacent tissue) in the results below. The tumor tissue and the “matched margins” are evaluated by independent pathologists (the surgical pathologists and again by a pathologist at Ardais). Unmatched malignant and non-malignant RNA samples from lungs were also obtained from Ardais. Additional information from Ardais provides a gross histopathological assessment of tumor differentiation grade and stage. Moreover, most samples include the original surgical pathology report that provides information regarding the clinical state of the patient.

[0632] Panel 3D, 3.1 and 3.2

[0633] The plates of Panel 3D, 3.1 and 3.2 are comprised of 94 cDNA samples and two control samples Specifically, 92 of these samples are derived from cultured human cancer cell lines. 2 samples of human primary cerebellar tissue and 2 controls. The human cell lines are generally obtained from ATCC (American Type Culture Collection), NCI or the German tumor cell bank and fall into the following tissue groups: Squamous cell carcinoma of the tongue, breast cancer, prostate cancel, melanoma, epidermoid carcinoma, sarcomas, bladder carcinomas, pancreatic cancers, kidney cancers, leukemias/lymphomas, ovarian/uterine/cervical, gastric, colon, lung and CNS cancer cell lines. In addition, there are two independent samples of cerebellum. These cells ale all cultured under standard recommended conditions and RNA extracted using the standard procedures. The cell lines in panel 3D, 3.1, 3.2, 1, 1.1., 1.2, 1.3D, 1.4, 1.5, and 1.6 are of the most common cell lines used in the scientific literature.

[0634] Panels 4D, 4R, and 4.1D

[0635] Panel 4 includes samples on a 96 well plate (2 control wells, 94 test samples) composed of RNA (Panel 4R) or cDNA (Panels 4D/4.1D) isolated from various human cell lines or tissues related to inflammatory conditions. Total RNA from control normal tissues such as colon and lung (Stratagene, La Jolla, Calif.) and thymus and kidney (Clontech) was employed. Total RNA from liver tissue from cirrhosis patients and kidney from lupus patients was obtained from BioChain (Biochain Institute, Inc., Hayward, Calif.). Intestinal tissue for RNA preparation from patients diagnosed as having Crohn's disease and ulcerative colitis was obtained from the National Disease Research Interchange (NDRI) (Philadelphia, Pa.).

[0636] Astrocytes, lung fibroblasts, dermal fibroblasts, coronary artery smooth muscle cells, small airway epithelium, bronchial epithelium, microvascular dermal endothelial cells, microvascular lung endothelial cells, human pulmonary aortic endothelial cells, human umbilical vein endothelial cells were all purchased from Clonetics (Walkersville, Md.) and grown in the media supplied for these cell types by Clonetics. These primary cell types were activated with various cytokines or combinations of cytokines for 6 and/or 12-14 hours, as indicated. The following cytokines were used; IL-1 beta at approximately 1-5 ng/ml, TNF alpha at approximately 5-10 ng/ml, IFN gamma at approximately 20-50 ng/ml, IL-4 at approximately 5-10 ng/ml, IL-9 at approximately 5-10 ng/ml. IL-13 at approximately 5-10 ng/ml. Endothelial cells were sometimes starved for various times by culture in the basal media from Clonetics with 0.1% serum.

[0637] Mononuclear cells were prepared from blood of employees at CuraGen Corporation, using, Ficoll. LAK cells were prepared from these cells by culture in DMEM 5% FCS (Hyclone). 100 μM non essential amino acids (Gibco/Life Technologies. Rockville, Md.), 1 mM sodium pyruvate (Gibco), mercaptoethanol 5.5×10⁻⁵M (Gibco), and 10 mM Hepes (Gibco) and Interleukin 2 for 4-6 days. Cells were then either activated with 10-20 ng/ml PMA and 1-2 μg/ml ionomycin, IL-12 at 5-10 ng/ml, IFN gamma at 20-50 ng/ml and IL-18 at 5-10 ng/ml for 6 hours. In some cases, mononuclear cells were cultured for 4-5 days in DMEM 5% /FCS (Hyclone). 100 μM non essential amino acids (Gibco), 1 mM sodium pyruvate (Gibco), mercaptoethanol 5.5×10⁻⁵M (Gibco), and 10mM Hepes (Gibco) with PHA (phytohemagglutinin) or PWM (pokeweed mitogen) at approximately 5 μg/ml. Samples were taken at 24, 48 and 72 hours for RNA preparation. MLR (mixed lymphocyte reaction) samples ere obtained by taking blood from two donors, isolating the mononuclear cells using Ficoll and mixing the isolated mononuclear cells 1:1 at a final concentration of approximately 2×10⁶ cells/ml in DMEM 5% FCS (Hyclone). 100 μM non essential amino acids (Gibco). 1 mM sodium pyruvate (Gibco), mercaptoethanol (5.5×10⁻⁵M) (Gibco), and 10 mM Hepes (Gibco). The MLR was cultured and samples taken at various time points ranging from 1-7 days for RNA preparation.

[0638] Monocytes were isolated from mononuclear cells using CD14 Miltenyi Beads, +ve VS selection columns and a Vario Magnet according to the manufacturer's instructions. Monocytes were differentiated into dendritic cells by culture in DMEM 5% fetal calf serum (FCS) (Hyclone, Logan, Utah), 100 μM non essential amino acids (Gibco), 1 mM sodium pyruvate (Gibco), mercaptoethanol 5.5×10⁻⁵M (Gibco), and 10 mM Hepes (Gibco), 50 ng/ml GMCSF and 5 ng/ml IL-4 for 5-7 days. Macrophages were prepared by culture of monocytes for 5-7 days in DMEM 5% FCS (Hyclone), 100 μM non essential amino acids (Gibco), 1 mM sodium pyruvate (Gibco), mercaptoethanol 5.5×10⁻⁵M (Gibco), 10 mM Hepes (Gibco) and 10% AB Human Serum or MCSF at approximately 50 ng/ml. Monocytes, macrophages and dendritic cells were stimulated for 6 and 12-14 hours with lipopolysaccharide (LPS) at 100 ng/ml. Dendritic cells were also stimulated with anti-CD40 monoclonal antibody (Pharmingen) at 10 μg/ml for 6 and 12-14 hours.

[0639] CD4 lymphocytes, CD8 lymphocytes and NK cells were also isolated from mononuclear cells using CD4, CD8 and CD56 Miltenyi beads, positive VS selection columns and a Vario Magnet according to the manufacturer's instructions. CD45RA and CD45RO CD4 lymphocytes were isolated by depleting mononuclear cells of CD8, CD56, CD14 and CD19 cells using, CD8, CD56, CD14 and CD19 Miltenyi beads and positive selection. CD45RO beads were then used to isolate the CD45RO CD4 lymphocytes with the remaining cells being CD45RA CD4 lymphocytes. CD45RA CD4, CD45RO CD4 and CD8 lymphocytes were placed in DMEM 5% FCS (Hyclone), 100 μM noni essential amino acids (Gibco). 1 M sodium pyruvate (Gibco), mercaptoethanol 5.5×10⁻⁵M (Gibco), and 10 mM Hepes (Gibco) and plated at 10⁶ cells/ml onto Falcon 6 well tissue culture plates that had been coated overnight with 0.5 μg/ml anti-CD28 (Pharmingen) and 3 ug/ml anti-CD3 (OKT3. ATCC) in PBS. After 6 and 24 hours, the cells were harvested for RNA preparation. To prepare chronically activated CD8 lymphocytes, we activated the isolated CD8 lymphocytes for 4 days on anti-CD28 and anti-CD3 coated plates and then harvested the cells and expanded them in DMEM 5% FCS (Hyclone), 100 μM non essential amilo acids (Gibco), 1 mM sodium pyruvate (Gibco), mercaptoethanol 5.5×10⁻⁵M (Gibco), and 10 mM Hepes (Gibco) and IL.-2. The expanded CD8 cells were then activated again with plate bound anti-CD3 and anti-CD28 for 4 days and expanded as before. RNA was isolated 6 and 24 hours after the second activation and after 4 days of the second expansion culture. The isolated NK cells were cultured in DMEM 5% FCS (Hyclone), 100 μM non essential aminio acids (Gibco), 1 mM sodium pyruvate (Gibco), mercaptoethanol 5.5×10⁻⁵M (Gibco), and 10 mM Hepes (Gibco) and IL-2 for 4-6 days before RNA was prepared.

[0640] To obtain B cells, tonsils were procured from NDRI. The tonsil was cut up with sterile dissecting scissors and then passed through a sieve. Tonsil cells were then spun down and resupended at 10⁶ cells/ml in DMEM 5% FCS (Hyclone), 100 μM non essential amino acids (Gibco), 1 mM sodium pyruvate (Gibco), mercaptoethanol 5.5×10⁻⁵M (Gibco), and 10 mM Hepes (Gibco). To activate the cells, we used PWM at 5 μg/ml or anti-CD40 (Pharmingen) at approximately 10 μg/ml and IL-4 at 5-10 ng/ml. Cells were harvested for RNA preparation at 24,48 and 72 hours.

[0641] To prepare the primary and secondary Th1/Th2 and Tr1 cells, six-well Falcon plates were coated overnight with 10 μg/ml anti-CD28 (Pharmingen) and 2 μg/ml OKT3 (ATCC), and then washed twice with PBS. Umbilical cord blood CD4 lymphocytes (Poietic Systems, German Town, Md.) were cultured at 10⁵-10⁶ cells/ml in DMEM 5% FCS (Hyclone), 100 μM non essential amino acids (Gibco), 1 mM sodium pyruvate (Gibco), mercaptoethanol 5.5×10⁻⁵M (Gibco), and 10 mM Hepes (Gibco) and IL-2 (4 ng/ml). IL-12 (5 ng/ml) and anti-IL4 (1 μg/ml) were used to direct to Th1, while IL-4 (5 ng/ml) and anti-IFN gamma (1 μg/ml) were used to direct to Th2 and IL-10 at 5 ng/ml was used to direct to Tr1. After 4-5 days, the activated Th1, Th2 and Tr1 lymphocytes were washed once in DMEM and expanded for 4-7 days in DMEM 5% FCS (Hyclone), 100 μM non essential amino acids (Gibco), 1 mM sodium pyruvate (Gibco), mercaptoethanol 5.5×10⁻⁵M (Gibco), and 10 mM Hepes (Gibco) and IL-2 (1 ng/ml). Following this, the activated Th1, Th2 and Tr1 lymphocytes were re-stimulated for 5 days with anti-CD28/OKT3 and cytokines as described above, but with the addition of anti-CD95L (1 μg/ml) to prevent apoptosis. After 4-5 days, the Th1, Th2 and Tr1 lymphocytes were washed and then expanded again with IL-2 for 4-7 days. Activated Th1 and Th2 lymphocytes were maintained in this way for a maximum of three cycles. RNA was prepared from primary and secondary Th1, Th2 and Tr1 after 6 and 24 hours following the second and third activations with plate bound anti-CD3 and anti-CD28 mAbs anid 4 days into the second and third expansion cultures in Interleukin 2.

[0642] The following leukocyte cells lines were obtained from the ATCC: Ramos, EOL-1, KU-812. EOL cells were further differentiated by culture in 0.1 mM dbcAMP at 5.5×10⁵ cells/ml for 8 days, changing the media every 3 days and adjusting the cell concentration to 5.5×10⁵ cells/ml. For the culture of these cells, we used DMEM or RPMI (as recommended by the ATCC), with the addition of 5% FCS (Hyclone), 100 μM non essential amino acids (Gibco), 1 mM sodium pyruvate (Gibco), mercaptoethanol 5.5×10⁻⁵M (Gibco), 10 mM Hepes (Gibco). RNA was either prepared from resting cells or cells activated with PMA at 10 ng/ml and ionomycin at 1 μg/ml for 6 and 14 hours. Keratinocyte line CCD106 and an airway epithelial tumor line NCI-H292 were also obtained from the ATCC. Both were cultured in DMEM 5% FCS (Hyclone), 100 μM non essential aminio acids (Gibco), 1 mM sodium pyruvate (Gibco), mercaptoethanol 5.5×10⁻⁵M (Gibco), and 10 mM Hepes (Gibco). CCD1106 cells were activated for 6 and 14 hours with approximately 5 ng/ml TNF alpha and 1 ng/ml IL-1 beta, while NCI-H292 cells were activated for 6 and 14 hours with the following cytokines: 5 ng/ml IL-4, 5 ng/ml IL-9, 5ng,/ml IL-13 and 25 ng/ml IFN gamma.

[0643] For these cell lines and blood cells, RNA was prepared by lysing approximately 10⁷ cells/ml using Trizol (Gibco BRL). Briefly, 1/10 volume of bromochloropropane (Molecular Research Corporation) was added to the RNA sample, vortexed and after 10 minutes at room temperature, the tubes were spun at 14,000 rpm in a Sorvall SS34 rotor. The aqueous phase was removed and placed in a 15 ml Falcon Tube. An equal volume of isopropanol was added and left at −20° C. overnight. The precipitated RNA was spun down at 9,000 rpm for 15 min in a Sorvall SS34 rotor and washed in 70% ethanol. The pellet was redissolved in 300 μl of RNAse-free water and 35 μl buffer (Promega) 5 μl DTT, 7 μl RNAsin and 8 μl DNAse were added. The tube was incubated at 37° C. for 30 minutes to remove contaminating genomic DNA, extracted once with phenol chloroform and re-precipitated with 1/10 volume of 3M sodium acetate and 2 volumes of 100% ethanol. The RNA was spun down and placed in RNAse free water. RNA was stored at −80° C.

[0644] Al_comprehensive panel_v1.0

[0645] The plates for AI_comprehensive panel_v 1.0 include two control wells and 89 test samples comprised of cDNA isolated from surgical and postmortem human tissues obtained from the Backus Hospital and Clinomics (Frederick. Md.). Total RNA was extracted from tissue samples from the Backus Hospital in the Facility at CuraGen. Total RNA from other tissues was obtained from Clinomics.

[0646] Joint tissues including synovial fluid, synovium, bone and cartilage were obtained from patients undergoing total knee or hip replacement surgery at the Backus Hospital. Tissue samples were immediately snap frozen in liquid nitrogen to ensure that isolated RNA was of optimal quality and not degraded. Additional samples of osteoarthritis and rheumatoid arthritis joint tissues were obtained from Clinomics. Normal control tissues were supplied by Clinomics and were obtained during autopsy of trauma victims.

[0647] Surgical specimens of psoriatic tissues and adjacent matched tissues were provided as total RNA by Clinomics. Two male and two female patients were selected between the ages of 25 and 47. None of the patients were taking prescription drugs at the time samples were isolated.

[0648] Surgical specimens of diseased colon from patients with ulcerative colitis and Crohns disease and adjacent matched tissues were obtained from Clinomics. Bowel tissue from three female and three male Crohn's patients between the ages of 41-69 were used. Two patients were not on prescription medication while the others were taking dexamethasone, phenobarbital, or tylenol. Ulcerative colitis tissue was from three male and four female patients. Four of the patients were taking lebvid and two were on phenobarbital.

[0649] Total RNA from post mortem lung tissue from trauma victims with no disease or with emphysema, asthma or COPD was purchased from Clinomics. Emphysema patients ranged in age from 40-70 and all were smokers, this age range was chosen to focus on patients with cigarette-linked emphysema and to avoid those patients with alpha-1 anti-trypsin deficiencies. Asthma patients ranged in age from 36-75, and excluded smokers to prevent those patients that could also have COPD. COPD patients ranged in age from 35-80 and included both smokers and non-smokers. Most patients were taking corticosteroids, and bronchodilators.

[0650] In the labels employed to identify tissues in the Al_comprehensive panel_v1.0 panel, the following abbreviations are used:

[0651] Al=Autoimmunity

[0652] Syn=Synovial

[0653] Normal=No apparent disease

[0654] Rep22 /Rep20=individual patients

[0655] RA=Rheumatoid arthritis

[0656] Backus=From Backus Hospital

[0657] OA=Osteoarthritis

[0658] (SS)(BA)(MF)=Individual patients

[0659] Adj=Adjacent tissue

[0660] Match control=adjacent tissues

[0661] -M=Male

[0662] -F=Female

[0663] COPD=Chronic obstructive pulmonary disease

[0664] Panels 5D and 5I

[0665] The plates for Panel 5D and 5I include two control wells and a variety of cDNAs isolated from human tissues and cell lines with an emphasis on metabolic diseases. Metabolic tissues were obtained from patients enrolled in the Gestational Diabetes study. Cells were obtained during different stages in the differentiation of adipocytes from human mesenchymal stem cells. Human pancreatic islets were also obtained.

[0666] In the Gestational Diabetes study subjects are young (18-40 years), otherwise healthy women with and without gestational diabetes undergoing routine (elective) Caesarean section. After delivery of the infant, when the surgical incisions were being repaired/closed, the obstetrician removed a small sample (<1 cc) of the exposed metabolic tissues during the closure of each surgical level. The biopsy material was rinsed in sterile saline, blotted and fast frozen within 5 minutes from the time of removal. The tissue was then flash frozen in liquid nitrogen and stored, individually, in sterile screw-top tubes and kept on dry ice for shipment to or to be picked up by CuraGen. The metabolic tissues of interest include uterine wall (smooth muscle), visceral adipose, skeletal muscle (rectus) and subcutaneous adipose. Patient descriptions are as follows:

[0667] Patient 2: Diabetic Hispanic, overweight, not on insulin

[0668] Patient 7-9: Nondiabetic Caucasian and obese (BMI>30)

[0669] Patient 10: Diabetic Hispanic, overweight, on insulin

[0670] Patient 11: Nondiabetic African American and overweight

[0671] Patient 12: Diabetic Hispanic on insulin

[0672] Adiocyte differentiation was induced in donor progenitor cells obtained from Osirus (a division of Clonetics/Bio Wittaker) in triplicate, except for Donor 3U which had only two replicates. Scientists at Clonetics isolated, grew and differentiated human mesenchymal stem cells (HuMSCs) for CuraGen based on the published protocol found in Mark F. Pittener, et al., Multilineage Potential of Adult Human Mesenchymal Stem Cells Science Apr. 2, 1999: 143-147. Clonetics provided Trizol lysates or frozen pellets suitable for mRNA isolation and ds cDNA production. A general description of each donor is as follows:

[0673] Donor 2 and 3 U: Mesenchymal Stem cells, Undifferentiated Adipose

[0674] Donor 2 and 3 AM: Adipose, Adipose Midway Differentiated

[0675] Donor 2 and 3 AD: Adipose, Adipose Differentiated

[0676] Human cell lines were generally obtained from ATCC (American Type Culture Collection), NCI or the German tumor cell bank and fall into the following tissue groups: kidney proximal convoluted tubules uterine smooth muscle cells, small intestine, liver HepG2 cancer cells, heart primary stromal cells, and adrenal cortical adenoma cells. These cells are all cultured under standard recommended conditions and RNA extracted using the standard procedures. All samples were processed at CuraGen to produce single stranded cDNA.

[0677] Panel 5I contains all samples previously described with the addition of pancreatic islets from a 58 year old female patient obtained from the Diabetes Research Institute at the University of Miami School of Medicine. Islet tissue was processed to total RNA at an outside source and delivered to CuraGen for addition to panel 5I.

[0678] In the labels employed to identify tissues in the 5D and 5I panels, the following abbreviations are used:

[0679] GO Adipose=Greater Omentum Adipose

[0680] SK=Skeletal Muscle

[0681] UT=Uterus

[0682] PL=Placenta

[0683] AD=Adipose Differentiated

[0684] AM=Adipose Midway Differentiated

[0685] U=Undifferentiated Stem Cells

[0686] Panel CNSD.01

[0687] The plates for Panel CNSD.01 include two control wells and 94 test samples comprised of cDNA isolated from postmortem human brain tissue obtained from the Harvard Brain Tissue Resource Center. Brains are removed from calvaria of donors between 4 and 24 hours after death, sectioned by neuroanatomists, and frozen at −80° C. in liquid nitrogen vapor. All brains are sectioned and examined by neuropathologists to confirm diagnoses with clear associated neuropathology.

[0688] Disease diagnoses are taken from patient records. The panel contains two brains from each of the following diagnoses: Alzheimer's disease. Parkinson's disease, Huntington's disease, Progressive Supernuclear Palsy, Depression, and “Normal controls”. Within each of these brains, the following regions are represented: cingulate gyrus, temporal pole, globus palladus, substantia nigra, Brodman Area 4 (primary motor strip), Brodman Area 7 (parietal cortex). Brodman Area 9 (prefrontal cortex), and Brodman area 17 (occipital cortex). Not all brain regions are represented in all cases; e.g., Huntington's disease is characterized in part by neurodegeneration in the globus palladus, thus this region is impossible to obtain from confirmed Huntington's cases. Likewise Parkinson's disease is characterized by degeneration of the substantia nigra making this region more difficult to obtain. Normal control brains were examined for neuropathology and found to be free of any pathology consistent with neurodegeneration.

[0689] In the labels employed to identify tissues in the CNS panel, the following abbreviations are used:

[0690] PSP=Progressive supranuclear palsy

[0691] Sub Nigra=Substantia nigra

[0692] Glob Palladus=Globus palladus

[0693] Temp Pole=Temporal pole

[0694] Cing Gyr=Cingulate gyrus

[0695] BA 4=Brodman Area 4

[0696] Panel CNS_Neurodegeneration_V1.0

[0697] The plates for Panel CNS_Neurodegeneration_V1.0 include two control wells and 47 test samples comprised of cDNA isolated from postmortem human brain tissue obtained from the Harvard Brain Tissue Resource Center (McLean Hospital) and the Human Brain and Spinal Fluid Resource Center (VA Greater Los Angeles Healthcare System). Brains are removed from calvaria of donors between 4 and 24 hours after death, sectioned by neuroanatomists, and frozen at −80° C. in liquid nitrogen vapor. All brains are sectioned and examined by neuropathologists to confirm diagnoses with clear associated neuropathology.

[0698] Disease diagnoses are taken from patient records. The panel contains six brains from Alzheimer's disease (AD) patients, and eight brains from “Normal controls” who showed no evidence of dementia prior to death. The eight normal control brains are divided into two categories: Controls with no dementia and no Alzheimer's like pathology (Controls) and controls with no dementia but evidence of severe Alzheimer's like pathology, (specifically senile plaque load rated as level 3 on a scale of 0-3; 0=no evidence of plaques, 3=severe AD senile plaque load). Within each of these brains, the following regions are represented: hippocampus, temporal cortex (Brodman Area 21), parietal cortex (Brodman area 7), and occipital cortex (Brodman area 17). These regions ere chosen to encompass all levels of neurodegeneration in AD. The hippocampus is a region of early and severe neuronal loss in AD the temporal cortex is known to show neurodegeneration in AD after the hippocampus, the parietal cortex shown moderate neuronal death in the late stages of the disease; the occipital cortex is spared in AD and therefore acts as a “control” region within AD patients. Not all brain regions are represented in all cases.

[0699] In the labels employed to identify tissues in the CNS_Neurodegeneration_V1.0 panel the following abbreviations are used:

[0700] AD=Alzheimer's disease brain: patient was demented and showed AD-like pathology upon autopsy

[0701] Control=Control brains; patient not demented, showing no neuropathology

[0702] Control (Path)=Control brains; patient not demented but showing sever AD-like pathology

[0703] SupTemporal Ctx=Superior Temporal Cortex

[0704] Inf Temporal Ctx=Inferior Temporal Cortex

[0705] A. CG102071-03: MAP Kinase Phosphatase-like.

[0706] Expression of gene CG102071-03 was assessed using the primer-probe set Ag6815, described in Table AA. Results of the RTQ-PCR runs are shown in Tables AB and AC.

TABLE AA

Probe Name Ag6815

| | | | | |
|---|---|---|---|---|
| Primers | Sequences | Length | Start Position | SEQ ID No |

| | | | | |
|---|---|---|---|---|
| Forward | 5′-ttgcacttcttgacatagg-3′ | 119 | 142 | 177 |
| Probe | TET-5′-acctctgcaaggtctgctcgttactat-3′-TAMRA | 27 | 167 | 178 |
| Reverse | 5′-gtcacttcattgggtatcag-3′ | 20 | 229 | 179 |

[0707] TABLE AB
General_screening_panel_v1.6

| | Rel. |
|---|---|
| | Exp.(%) |
| | Ag6815, |
| | Run |
| Tissue Name | 278019589 |
| Adipose | 1.4 |
| Melanoma*Hs688(A).T | 6.9 |
| Melanoma*Hs688(B).T | 8.4 |
| Melanoma*M14 | 0.2 |
| Melanoma*LOXIMVI | 11.9 |
| Melanonia*SK-MEL-5 | l4.4 |
| Squamous cell carcinoma SCC-4 | 21.3 |
| Testis Pool | 3 0 |
| Prostate ca.*(bone met) PC-3 | 7.4 |
| Prostate Pool | 2.8 |
| Placenta | 4.9 |
| Uterus Pool | 0.0 |
| Ovarian ca. OVCAR-3 | 31.6 |
| Ovarian ca. SK-OV-3 | 29 7 |
| Ovarian ca. OVCAR-4 | 26.6 |
| Ovarian ca. OVCAR-5 | 32.1 |
| Ovarian ca. IGROV-1 | 27.0 |
| Ovarian ca. OVCAR-8 | 5.7 |
| Ovary | 1.7 |
| Breast ca. MCF-7 | 34.2 |
| Breast ca. MDA-MB-231 | 77.9 |
| Breast ca. BT 549 | 12.2 |
| Breast ca. T47D | 12.1 |
| Breast ca. MDA-N | 0.0 |
| Breast Pool | 3.6 |
| Trachea | 2.8 |
| Lung | 2.0 |
| Fetal Lung | 3.7 |
| Lung ca. NCI-N417 | 4.9 |
| Lung ca. LX-1 | 20.4 |
| Lung ca. NCI-H146 | 2.2 |
| Lung ca. SHP-77 | 0.6 |
| Lung ca. A549 | 35.6 |
| Lung ca. NCI-H526 | 1.6 |
| Lung ca. NCI-H23 | 23.3 |
| Lung ca. NCI-H460 | 3.2 |
| Lung ca. HOP-62 | 16.2 |
| Lung ca. NCI-H1522 | 41.8 |
| Liver | 1.1 |
| Fetal Liver | 2.8 |
| Liver ca. HepG2 | 1.0 |
| Kidney Pool | 2.2 |
| Fetal Kidney | 0.0 |
| Renal ca. 786-0 | 39.8 |
| Renal ca. A498 | 3.9 |
| Renal ca. ACHN | 1.2 |
| Renal ca. UO-31 | 45.7 |
| Renal ca. TK-10 | 76.8 |
| Bladder | 11.3 |
| Gastric ca. (liver met.) NCI-N87 | 53.2 |
| Gastric ca. KATO III | 80.7 |
| Colon ca. SW-948 | 15.6 |
| Colon ca. SW480 | 100.0 |
| Colon ca.*(SW480 met) SW620 | 24.0 |
| Colon ca. HT29 | 25.2 |
| Colon ca. HCT-116 | 30.6 |
| Colon ca. CaCo-2 | 6.6 |
| Colon cancer tissue | 9.6 |
| Colon ca. SW1116 | 18.3 |
| Colon ca. Colo-205 | 6.1 |
| Colon ca. SW-48 | 8.9 |
| Colon Pool | 3.2 |
| Small Intestine Pool | 0.2 |
| Stomach Pool | 0.8 |
| Bone Marrow Pool | 0.9 |
| Fetal Heart | 0.4 |
| Heart Pool | 1.2 |
| Lymph Node Pool | 2.2 |
| Fetal Skeletal Muscle | 1.4 |
| Skeletal Muscle Pool | 0.0 |
| Spleen Pool | 2.5 |
| Thymus Pool | 1.8 |
| CNS cancer(glio/astro) U87-MG | 70.7 |
| CNS cancer(glio/astro) U-118-MG | 14.0 |
| CNS cancer(neuro;met) SK-N-AS | 36.6 |
| CNS cancer(astro) SF-539 | 15.9 |
| CNS cancer(astro) SNB-75 | 40.3 |
| CNS cancer(glio) SNB-19 | 31.0 |
| CNS cancer(glio) SF-295 | 39.0 |
| Brain(Amygdala) Pool | 3.3 |
| Brain(cerebellum) | 2.2 |
| Brain(fetal) | 2.0 |
| Brain(Hippocampus) Pool | 1.8 |
| Cerebral Cortex Pool | 1.0 |
| Brain(Substantia nigra) Pool | 1.0 |
| Brain(Thalamus) Pool | 3.6 |
| Brain(whole) | 0.9 |
| Spinal Cord Pool | 2.7 |
| Adrenal Gland | 4.5 |
| Pituitary gland Pool | 0.6 |
| Salivary Gland | 3.1 |
| Thyroid(female) | 4.0 |
| Pancreatic ca. CAPAN2 | 42.6 |
| Pancreas Pool | 3.1 |

[0708] TABLE AC
Panel 4.1D

| | Rel. |
|---|---|
| | Exp.(%) |
| | Ag6815, |
| | Run |
| Tissue Name | 278022637 |
| Secondary Th1 act | 28.7 |
| Secondary Th2 act | 65.5 |
| Secondary Tr1 act | 26.4 |
| Secondary Th1 rest | 1.9 |
| Secondary Th2 rest | 12.9 |
| Secondary Tr1 rest | 9.2 |
| Primary Th1 act | 17.4 |
| Primary Th2 act | 55.1 |
| Primary Tr1 act | 54.7 |
| primary Th1 rest | 0.0 |
| Primary Th2 rest | 4.1 |
| Primary Tr1 rest | 0.7 |
| CD45RA CD4 lymphocyte act | 54.0 |
| CD45RO CD4 lymphocyte act | 39.5 |
| CD8 lymphocyte act | 6.9 |
| Secondary CD8 lymphocyte rest | 0.0 |
| Secondary CD8 lymphocyte act | 6.5 |
| CD4 lymphocyte none | 1.8 |
| 2ry Th1/Th2/Tr1_anti-CD95 CH11 | 10.0 |
| LAK cells rest | 12.2 |
| LAK cells IL-2 | 3.0 |
| LAK cells IL-2 + IL-12 | 0.0 |
| LAK cells IL-2 + IFN gamma | 0.0 |
| LAK cells IL-2 + IL-18 | 2.5 |
| LAK cells PMA/ionomycin | 1.0 |
| NK Cells IL-2 rest | 72.7 |
| Two Way MLR 3 day | 20.3 |
| Two Way MLR 5 day | 6.0 |
| Two Way MLR 7 day | 3.6 |
| PBMC rest | 1.8 |
| PBMC PWM | 9.6 |
| PBMC PHA-L | 10.5 |
| Ramos(B cell) none | 17.2 |
| Ramos(B cell) ionomycin | 78.5 |
| B lymphocytes PWM | 3.4 |
| B lymphocytes CD40L and IL-4 | 25.2 |
| EOL-1 dbcAMP | 25.3 |
| EOL-1 dbcAMP PMA/ionomycin | 7.6 |
| Dendritic cells none | 8.8 |
| Dendritic cells LPS | 6.3 |
| Dendritic cells anti-CD40 | 13.2 |
| Monocytes rest | 7.1 |
| Monocytes LPS | 45.7 |
| Macrophages rest | 8.4 |
| Macrophages LPS | 21.0 |
| HUVEC none | 23.8 |
| HUVEC starved | 27.9 |
| HUVEC IL-1beta | 40.9 |
| HUVEC IFN gamma | 38.4 |
| HUVEC TNF alpha + IFN gamma | 24.0 |
| HUVEC TNF alpha + IL4 | 21.0 |
| HUVEC IL-11 | 10.5 |
| Lung Microvascular EC none | 86.5 |
| Lung Microvascular EC TNFalpha + IL-1beta | 27.0 |
| Microvascular Dermal EC none | 5.5 |
| Microsvasular Dermal EC TNFalpha + | 0.0 |
| IL-1beta | |
| Bronchial epithelium TNFalpha + | 27.2 |
| IL1beta | |
| Small airway epithelium none | 0.0 |
| Small airway epithelium TNFalpha + | 5.8 |
| IL-1beta | |
| Coronery artery SMC rest | 63.7 |
| Coronery artery SMC TNFalpha + IL-1beta | 32.1 |
| Astrocytes rest | 12.9 |
| Astrocytes TNFalpha + IL-1beta | 7.1 |
| KU-812(Basophil) rest | 0.0 |
| KU-812(Basophil) PMA/ionomycin | 0.0 |
| CCD1106(Keratinocytes) none | 100.0 |
| CCD1106(Keratinocytes) TNFalpha + | 9.7 |
| IL-1beta | |
| Liver cirrhosis | 5.6 |
| NCI-H292 none | 0.9 |
| NCI-H292 IL-4 | 6.5 |
| NCI-H292 IL-9 | 3.8 |
| NCI-H292 IL-13 | 1.9 |
| NCI-H292 IFN gamma | 0.0 |
| HPAEC none | 0.0 |
| HPAEC TNFalpha + IL-1beta | 18.8 |
| Lung fibroblast none | 11.0 |
| Lung fibroblast TNF alpha + IL-1beta | 22.5 |
| Lung fibroblast IL-4 | 9.5 |
| Lung fibroblast IL-9 | 17.6 |
| Lung fibroblast IL-13 | 12.9 |
| Lung fibroblast IFN gamma | 27.2 |
| Dermal fibroblast CCD1070 rest | 57.4 |
| Dermal fibroblast CCD1070 TNF alpha | 94.0 |
| Dermal fibroblast CCD1070 IL-1 beta | 26.2 |
| Dermal fibroblast IFN gamma | 6.6 |
| Dermal fibroblast IL-4 | 11.7 |
| Dermal Fibroblasts rest | 8.5 |
| Neutrophils TNFa + LPS | 2.6 |
| Neutrophils rest | 5.5 |
| Colon | 3.1 |
| Lung | 0.0 |
| Thymus | 0.0 |
| Kidney | 25.9 |

[0709] CNS_neurodegeneration_v1.0 Summary: Ag6815 Results from one experiment with this gene are not included. The amp plot indicates that there were experimental difficulties with this run.

[0710] General_screening_panel_v1.6 Summary: Ag6815 Highest expression of this gene is seen in a colon cancer cell line (CT=28.7). This gene is widely expressed in this panel, with prominent levels of expression in all cancer cell lines, including brain, pancreatic, renal, gastric, lung, breast, ovarian, and melanoma cancer cell lines. This expression profile suggests a role for this gene product in cell survival and proliferation. Modulation of this gene product may be useful in the treatment of cancer.

[0711] Among tissues with metabolic function, this gene is expressed at low but significant levels in adipose, adrenal gland, pancreas, thyroid, fetal skeletal muscle, and adult and fetal liver. This widespread expression among these tissues suggests that this gene product may play a role in normal neuroendocrine and metabolic function and that disregulated expression of this gene may contribute to neuroendocrine disorders or metabolic diseases, such as obesity and diabetes.

[0712] This gene is also expressed at loss but significant levels in the CNS, including the hippocampus, thalamus, substantia nigra, amygdala, cerebellum and cerebral cortex. Therefore, therapeutic modulation of the expression or function of this gene may be useful in the treatment of neurologic disorders. Such as Alzheimer's disease, Parkinson's disease, schizophrenia, multiple sclerosis, stroke and epilepsy.

[0713] Panel 4.1D Summary: Ag6815 Highest expression is seen in untreated keratinocytes. (CT=31.3). Moderate levels of expression are seen in several untreated or resting cell types, including NK cells, coronary artery SMCs, lung microvascular endothelial cells, as well as in activated primary and secondary T cells. In addition, this gene is expressed at low but significant levels in many other samples on this pane. This ubiquitous pattern of expression suggests that this gene product may be involved in homeostatic processes for these and other cell types and tissues. This pattern is in agreement with the expression profile in General_screening_panel_v1.4 and also suggests a role for the gene product in cell survival and proliferation. Therefore, modulation of the gene product with a functional therapeutic may lead to the alteration of functions associated with these cell types and lead to improvement of the symptoms of patients suffering from autoimmune and inflammatory diseases such as asthma, allergies, inflammatory bowel disease, lupus erythematosus, psoriasis, rheumatoid arthritis, and osteoarthritis.

[0714] B. CG102734-01 and CG102734-02: RAS-Related Protein RAB-4A.

[0715] Expression of gene CG102734-01 and CG102734-02 was assessed using the primer-probe set Ag4213, described in Table BA. Results of the RTQ-PCR runs are shown in Tables BB and BC.

TABLE BA

Probe Name Ag4213

| | | | | |
|---|---|---|---|---|
| Primers | Sequences | Length | Start Position | SEQ ID No: |

| | | | | |
|---|---|---|---|---|
| Forward | 5′-gaaaagasaatttsgsgtgttc-3′ | 22 | 870 | 180 |
| Probe | 5′-ccagtcaaagtggcacagcaaatcat-3′-TAMRA | 26 | 898 | 181 |
| Reverse | 5′-catctaacggtgttgtccattt-3′ | 22 | 936 | 182 |

[0716] TABLE BB
General_screening_panel_v1.4

| | Rel. |
|---|---|
| | Exp.(%) |
| | Ag4213, |
| | Run |
| Tissue Name | 213323527 |
| Adipose | 6.1 |
| Melanoma*Hs688(A).T | 24.0 |
| Melanoma*Hs688(B).T | 32.5 |
| Melanoma*M14 | 26.8 |
| Melanoma*LOXIMVI | 12.1 |
| Melanoma*SK-MEL-5 | 18.8 |
| Cell carcinoma SCC-4 | 17.2 |
| Testis Pool | 10.6 |
| Prostate ca.(bone met) PC-3 | 52 5 |
| Prostate Pool | 21.8 |
| Placenta | 9.5 |
| Uterus Pool | 6.1 |
| Ovarian ca. OVCAR-3 | 49.3 |
| Ovarian ca. SK-OV-3 | 100.0 |
| Ovarian ca. OVCAR-4 | 12.3 |
| Ovarian ca. OVCAR-5 | 40.1 |
| Ovarian ca. IGROV-1 | 26.2 |
| Ovarian ca. OVCAR-8 | 24.7 |
| Ovary | 19.8 |
| Breast ca. MCF-7 | 62.0 |
| Breast ca. MDA-MB-231 | 34.6 |
| Breast ca. BT 549 | 47.6 |
| Breast ca. T47D | 97.9 |
| Breast ca. MDA-N | 0.0 |
| Breast Pool | 22.1 |
| Trachea | 37.9 |
| Lung | 10.7 |
| Fetal Lung | 16.7 |
| Lung ca. NCI-N417 | 2.8 |
| Lung ca. LX-1 | 46.7 |
| Lung ca. NCI-H146 | 8.2 |
| Lung ca. SHP-77 | 20.4 |
| Lung ca. A549 | 37.9 |
| Lung ca. NCI-H526 | 6.0 |
| Lung ca. NCI-H23 | 73.2 |
| Lung ca. NCI-H460 | 55.5 |
| Lung ca. HOP-62 | 20.6 |
| Lung ca. NCI-H522 | 60.7 |
| Liver | 4.1 |
| Fetal Liver | 36.6 |
| Liver ca. HepG2 | 81.2 |
| Kidney Pool | 34.2 |
| Fetal Kidney | 13.6 |
| Renal ca. 786-0 | 17.6 |
| Renal ca. A498 | 4.4 |
| Rcnal ca. ACHN | 21.3 |
| Renal ca. UO-31 | 7.4 |
| Renal ca. TK-10 | 47.0 |
| Bladder | 30.8 |
| Gastric ca.(liver met.) NCI-N87 | 38.2 |
| Gastric ca. KATO III | 49.0 |
| Colon ca SW-948 | 16.5 |
| Colon ca. SW480 | 49.7 |
| Colon ca*(SW480 met)SW620 | 30.8 |
| Colon ca. HT29 | 31.9 |
| Colon ca HCT-116 | 69.7 |
| Colon ca. CaCo-2 | 39.5 |
| Colon cancer tissue | 23.2 |
| Colon ca. SW1116 | 4.7 |
| Colon ca. Colo-205 | 23.8 |
| Colon ca. SW-48 | 23.8 |
| Colon Pool | 18.4 |
| Small Intestine Pool | 16.5 |
| Stomach Pool | 17.7 |
| Bone Marrow Pool | 8.0 |
| Fetal Heart | 6.2 |
| Heart Pool | 10.1 |
| Lymph Node Pool | 19.5 |
| Fetal Skeletal Muscle | 5.9 |
| Skeletal Muscle Pool | 16.6 |
| Spleen Pool | 7.1 |
| Thymus Pool | 11.4 |
| CNS cancer(glio/astro)U87-MG | 9.7 |
| CNS cancer(glio/astro)U-118-MG | 0.0 |
| CNS cancer(neuro;met)SK-N-AS | 35.4 |
| CNS cancer(astro)SF-539 | 9.8 |
| CNS cancer(astro)SNB-75 | 41.8 |
| CNS cancer(glio)SNB-19 | 24.1 |
| CNS cancer(glio)SF-295 | 32.1 |
| Brain(Amygdala)Pool | 25.9 |
| Brain(cerebellum) | 35.6 |
| Brain(fetal) | 41.2 |
| Brain(Hippocampus)Pool | 21.3 |
| Cerebral Cortex Pool | 19.8 |
| Brain(Substantia nigra)Pool | 24.0 |
| Brain(Thalamus)Pool | 39.8 |
| Brain(whole) | 38.2 |
| Spinal Cord Pool | 20.9 |
| Adrenal Gland | 14.1 |
| Pituitary gland Pool | 4.0 |
| Salivary Gland | 26.6 |
| Thyroid(Female) | 13.1 |
| Pancreatic ca. CAPAN2 | 40.3 |
| Pancreas Pool | 24.7 |

[0717] TABLE BC
Panel 5 Islet

| | Rel. |
|---|---|
| | Exp.(%) |
| | Ag4213, |
| | Run |
| Tissue Name | 174269009 |
| 97457_Patient-02go_adipose | 9.1 |
| 97476_Patient-07sk_skeletal | 15.1 |
| muscle | |
| 97477_Patient-07ut_uterus | 22.4 |
| 97478_Patient-07pl_placenta | 9.7 |
| 99167_Bayer Patient 1 | 40.9 |
| 97482_Patient-08ut_uterus | 17.3 |
| 97483_Patient-08pl_placenta | 8.4 |
| 97486_Patient-09sk_skeletal | 6.2 |
| muscle | |
| 97487_Patient-09ut_uterus | 17.8 |
| 97488_Patient-09pl_placenta | 7.9 |
| 97492_Patient-10ut_uterus | 25.2 |
| 97493_Patient-10pl_placenta | 26.1 |
| 97495_Patient-11go_adipose | 7.4 |
| 97496_Patient-11sk_skeletal | 18.8 |
| muscle | |
| 97497_Patient-11ut_uterus | 1.0 |
| 97498_Patient-11pl_placenta | 8.8 |
| 97500_Patient-12go_adipose | 10.7 |
| 97501_Patient-12sk_skeletal | 70.2 |
| muscle | |
| 97502_Patient-12ut_uterus | 46.3 |
| 97503_Patient-12pl_placenta | 10.6 |
| 94721_Donor 2 U - | 19.6 |
| A_Mesenchymal Stem Cells | |
| 94722_Donor 2 U - | 16.4 |
| B_Mesenchymal Stem Cells | |
| 94723_Donor 2 U - | 26.2 |
| C_Mesenchymal Stem Cells | |
| 94709_Donor 2 AM - A_adipose | 21.6 |
| 94710_Donor 2 AM - B_adipose | 19.2 |
| 94711_Donor 2 AM - C_adipose | 9.6 |
| 94712_Donor 2 AD - A_adipose | 23.2 |
| 94713_Donor 2 AD - B_adipose | 35.8 |
| 94714_Donor 2 AD - C_adipose | 21.2 |
| 94742_Donor 3 U - A_Mesenchymal Stem | 8.2 |
| Cells | |
| 94743_Donor 3 U - B_Mesenchymal Stem | 17.2 |
| Cells | |
| 94730_Donor 3 AM - A_adipose | 20.2 |
| 94731_Donor 3 AM - B_adipose | 10.7 |
| 94732_Donor 3 AM - C_adipose | 9.8 |
| 94733_Donor 3 AD - A_adipose | 23.5 |
| 94734_Donor 3 AD - B_adipose | 13.1 |
| 94735_Donor 3 AD - C_adipose | 0.9 |
| 77138_Liver_HepG2untreated | 100.0 |
| 73556_Heart_Cardiac stromal cells | 6.9 |
| (primary) | |
| 81735_Small Intestine | 20.6 |
| 72409_Kidney_Proximal Convoluted | 9.2 |
| Tubule | |
| 82685_Small intestine_Duodenum | 24.8 |
| 90650_Adrenal_Adrenocortical adenoma | 9.5 |
| 72410_Kidney_HRCE | 20.3 |
| 72411_Kidney_HRE | 15.7 |
| 73139_Uterus_Uterine smooth muscle cells | 3.7 |

[0718] General_screening_panel_v1.4 Summary: Ag4213 Highest expression of this gene is seen in an ovarian cancer cell line (CT=26). This gene is widely expressed in this panel, with high to moderate expression seen in all cancer cell lines on this panel, including brain, colon, gastric, lung, breast, ovarian, and melanoma cancer cell lines. This expression profile suggests a role for this gene product in cell survival and proliferation. Modulation of this gene product may be useful in the treatment of cancer.

[0719] Among tissues with metabolic function, this gene is expressed at moderate levels in pituitary, adipose, adrenal gland, pancreas, thyroid, and adult and fetal skeletal muscle, heart, and liver. This widespread expression among these tissues suggests that this gene product may play a role in normal neuroendocrine and metabolic function and that disregulated expression of this gene may contribute to neuroendocrine disorders or metabolic diseases, such as obesity and diabetes. In addition, this gene is expressed at much higher levels in fetal tissue (CT=27.5) when compared to expression in the adult counterpart (CT=30.5). Thus, expression of this gene may be used to differentiate between the fetal and adult source of this tissue.

[0720] This gene is also expressed at moderate levels in the CNS, including the hippocampus, thalamus, substantia nigra, amygdala, cerebellum and cerebral cortex. Therefore, therapeutic modulation of the expression or function of this gene may be useful in the treatment of neurologic disorders, such as Alzheimer's disease, Parkinson's disease, schizophrenia, multiple sclerosis, stroke and epilepsy.

[0721] Panel 5 Islet Summary: Ag4213 Highest expression of this gene is seen in a liver derived cell line (CT=29). In addition, moderate levels of expression are seen in metabolic tissues, including placenta, skeletal muscle and human islet cells. Rab4 has been shown to participate both in the intracellular retention of glucose transporter containing vesicles and in the insulin signaling pathway leading to glucose transporter translocation. (Le Marchand-Brustel, J Recept Signal Transduct Res 1999 January-July,19(1-4):217-28). Thus the expression of this putative Rab4 protein in tissues with metabolic function suggests that therapeutic modulation of the expression or function of this gene product may be of use in the treatment of insulin resistance, and associated obesity and type II diabetes.

[0722] C. CG 112785-01: G PCR.

[0723] Expression of gene CG112785-01 was assessed using the primer-probe set Ag4463, described in Table CA.

TABLE CA

Probe Name Ag4463

| Primers | Sequences | Length | Start Position | SEQ ID No |
|---|---|---|---|---|
| Forward | 5′-atcctaacccctttgtcacatt-3′ | 22 | 1085 | 183 |
| Probe | TET-5′-tgcttgatggttttattcctttccaca-3′-TAMRA | 27 | 1115 | 184 |
| Reverse | 5′-ggcataacaaagaagcaattca-3′ | 22 | 1151 | 185 |

[0724] CNS_neurodegeneration_v1.0 Summary: Ag4463 Expression of this gene is low/undetectable in all samples on this panel (CTs>35). (Data not shown.) The amp plot indicates that there is a high probability of a probe failure.

[0725] General_screening_panel_v1.4 Summary: Ag4463 Expression of this gene is low/undetectable in all samples on this panel (CTs>35). (Data not Shown.) The amp plot indicates that there is a high probability of a probe failure.

[0726] Panel 4.1D Summary: Ag4463 Expression of this gene is low/undetectable in all samples on this panel (CTs>35). (Data not shown.) The amp plot indicates that there is a high probability of a probe failure.

[0727] General Oncology Screening panel_v_{—}2.4 Summary: Ag4463 Expression of this gene is low/undetectable in all samples on this panel (CTs>35). (Data not shown.) The amp plot indicates that there is a high probability of a probe failure.

[0728] D. CG116818-02: Pyruvate Carboxylase Precursor.

[0729] Expression of gene CG116818-02 was assessed using, the primer-probe set Ag4745, described in Table DA.

TABLE DA

Probe Name Ag4745

| | | | | |
|---|---|---|---|---|
| Primers | Sequences | Length | Start Position | SEQ ID No |

| | | | | |
|---|---|---|---|---|
| Forward | 5′-gccaaggagaacaacgtagat-3′ | 21 | 405 | 186 |
| Probe | TET-5′-accctggctacgggttcctttctgag-3′-TAMRA | 26 | 433 | 187 |
| Reverse | 5′-ctgccaccactttgatgtctat-3′ | 22 | 471 | 188 |

[0730] CNS_neurodegeneration_v1.0 Summary: Ag4745 Expression of this gene is low/undetectable in all samples on this panel (CTs>35). (Data not shown.)

[0731] General_screening panel_v1.4 Summary: Ag4745 Expression of this (gene is low/undetectable in all samples on this panel (CTs>35). (Data not shown.)

[0732] Panel 4.1D Summary: Ag4745 Expression of this gene is low/undetectable in all samples on this panel (CTs>35). (Data not shown.)

[0733] Panel 5 Islet Summary: Ag4745 Expression of this gene is low/undetectable in all samples on this panel (CTs>35). (Data not shown.)

[0734] E. CG117653-02: Human ATP Binding Cassette ABCG1 (ABC8).

[0735] Expression of gene CG117653-02 was assessed using the primer-probe set Ag4881. described in Table EA. Results of the RTQ-PCR runs are shown in Tables EB and EC.

TABLE EA

Probe Name Ag4881

| | | | | |
|---|---|---|---|---|
| Primers | Sequences | Length | Start Position | SEQ ID No |

| | | | | |
|---|---|---|---|---|
| Forward | 5′-accaagaagqtcttgagcaact-3′ | 22 | 1360 | 189 |
| Probe | TET-5′-cttctccatgctgttcctcatgttcg-3′-TAMRA | 26 | 1395 | 190 |
| Reverse | 5′-caggggaaatgtcagaacagta-3′ | 22 | 191 | |

[0736] TABLE EB
General_screening_panel_v1.5

| | Rel. |
|---|---|
| | Exp.(%) |
| | Ag4881, |
| | Run |
| Tissue Name | 228806996 |
| Adipose | 5.6 |
| Melanoma*Hs688(A).T | 0.1 |
| Melanoma*Hs688(B).T | 0.0 |
| Melanoma*M14 | 0.0 |
| Melanoma*LOXIMVI | 0.0 |
| Melanoma*SK-MEL-5 | 0.4 |
| Squamous cell carcinoma SCC-4 | 1.0 |
| Testis Pool | 2.5 |
| Prostate ca.*(bone met)PC-3 | 10.2 |
| Prostate Pool | 2.5 |
| Placenta | 18.9 |
| Uterus Pool | 10.7 |
| Ovarian ca. OVCAR-3 | 4.6 |
| Ovarian ca. SK-OV-3 | 1.1 |
| Ovarian ca. OVCAR-4 | 0.8 |
| Ovarian ca. OVCAR-5 | 36.1 |
| Ovarian ca. IGROV-1 | 3.2 |
| Ovarian ca. OVCAR-8 | 1.4 |
| Ovary | 3.0 |
| Breast ca. MCF-7 | 15.5 |
| Breast ca. MDA-MB-231 | 2.1 |
| Breast ca. BT 549 | 0.0 |
| Breast ca. T47D | 3.4 |
| Breast ca. MDA-N | 0.1 |
| Breast Pool | 5.4 |
| Trachea | 16.8 |
| Lung | 1.6 |
| Fetal Lung | 55.9 |
| Lung ca. NCI-N417 | 0.0 |
| Lung ca. LX-1 | 28.1 |
| Lung ca. NCI-H146 | 7.8 |
| Lung ca. SHP-77 | 14.7 |
| Lung ca. A549 | 12.2 |
| Lung ca. NCI-H526 | 9.3 |
| Lung ca. NCI-H23 | 54.3 |
| Lung ca. NCI-H460 | 15.0 |
| Lung ca. HOP-62 | 4.0 |
| Lung ca. NCI-H522 | 17.8 |
| Liver | 1.5 |
| Fetal Liver | 5.4 |
| Liver ca. HepG2 | 0.0 |
| Kidney Pool | 4.4 |
| Fetal Kidney | 5.8 |
| Renal ca. 786-0 | 0.1 |
| Renal ca. A498 | 5.6 |
| Renal ca. ACHN | 0.0 |
| Renal ca. UO-31 | 2.1 |
| Renal ca. TK-10 | 0.0 |
| Bladder | 12.9 |
| Gastric ca.(liver met.)NCI-N87 | 58.6 |
| Gastric ca. KATO III | 6.7 |
| Colon ca. SW-948 | 0.1 |
| Colon ca. SW480 | 6.2 |
| Colon ca.(SW480 met)SW620 | 9.0 |
| Colon ca. HT29 | 5.1 |
| Colon ca. HCT-116 | 1.3 |
| Colon ca. CaCo-2 | 1.1 |
| Colon cancer tissue | 34.2 |
| Colon ca. SW1116 | 0.5 |
| Colon ca. Colo-205 | 8.0 |
| Colon ca. SW-48 | 3.9 |
| Colon Pool | 3.9 |
| Small Intestine Pool | 4.6 |
| Stomach Pool | 9.1 |
| Bone Marrow Pool | 1.8 |
| Fetal Heart | 7.5 |
| Heart Pool | 2.3 |
| Lymph Node Pool | 3.2 |
| Fetal Skeletal Muscle | 2.8 |
| Skeletal Muscle Pool | 15.2 |
| Spleen Pool | 41.5 |
| Thymus Pool | 20.9 |
| CNS cancer(glio/astro)U87-MG | 0.0 |
| CNS cancer(glio/astro)U-118-MG | 0.0 |
| CNS cancer(neuro;met)SK-N-AS | 0.1 |
| CNS cancer(astro)SF-539 | 0.0 |
| CNS cancer(astro)SNB-75 | 1.5 |
| CNS cancer(glio)SNB-19 | 2.9 |
| CNS cancer(glio)SF-295 | 43.2 |
| Brain(Amygdala)Pool | 18.7 |
| Brain(cerebellum) | 100.0 |
| Brain(fetal) | 18.8 |
| Brain(Hippocampus)Pool | 15.7 |
| Cerebral Cortex Pool | 8.0 |
| Brain(Substantia nigra)Pool | 15.0 |
| Brain(Thalamus)Pool | 23.7 |
| Brain(whole) | 23.8 |
| Spinal Cord Pool | 7.3 |
| Adrenal Gland | 56.6 |
| Pituitary gland Pool | 7.7 |
| Salivary Gland | 6.3 |
| Thyroid(female) | 3.8 |
| Pancreatic ca. CAPAN2 | 1.5 |
| Pancreas Pool | 7.1 |

[0737] TABLE EC
Oncology cell_line_screening_panel_v3.1

| | Rel. |
|---|---|
| | Exp(%) |
| | Ag4881, |
| | Run |
| Tissue Name | 225052577 |
| Daoy Medulloblastoma/Cerebellum | 0.5 |
| TE671 Medulloblastom/Cerebellum | 2.6 |
| D283 Med | 0.5 |
| Medulloblastoma/Cerebellum | |
| PFSK-1 Primitive | 7.3 |
| Neuroectodermal/Cerebellum | |
| XF-498_CNS | 2.9 |
| SNB-78_CNS/glioma | 1.0 |
| SF-268_CNS/glioblastoma | 0.0 |
| T98G_Glioblastoma | 0.0 |
| SK-N-SH_Neuroblastoma | 0.2 |
| (Metastasis) | |
| SF-295_CNS/glioblastoma | 2.0 |
| Cerebellum | 38.4 |
| Cerebellum | 40.6 |
| NCI-H292_Mucoepidermoid lung ca. | 29.1 |
| DMS-114_Small cell lung cancer | 0.2 |
| DMS-79_Small cell lung | 9.9 |
| cancer/neuroendocrine | |
| NCI-H146_Small cell lung | 15.4 |
| cancer/neuroendocrine | |
| NCI-H526_Small cell lung | 31.4 |
| cancer/neuroendocrine | |
| NCI-N417_Small cell lung | 0.2 |
| cancer/neuroendocrine | |
| NCI-H82_Small cell lung | 0.8 |
| cancer/neuroendocrine | |
| NCI-H157_Squamous cell lung | 0.0 |
| cancer(metastasis) | |
| NCI-H1155_Large cell lung | 100.0 |
| cancer/neuroendocrine | |
| NCI-H1299_Large cell lung | 0.5 |
| cancer/neuroendocrine | |
| NCI-H727_Lung carcinoid | 61.1 |
| NCI-UMC-11_Lung carcinoid | 4.4 |
| LX-1_Small cell lung cancer | 5.0 |
| Colo-205_Colon cancer | 12.3 |
| KM12_Colon cancer | 0.1 |
| KM20L2_Colon cancer | 4.2 |
| NCI-H716_Colon cancer | 23.7 |
| SW-48_Colon adenocarcinoma | 8.1 |
| SW1116_Colon adenocarcinoma | 0.3 |
| LS 174T_Colon adenocarcinoma | 1.0 |
| SW-948_Colon adenocarcinoma | 0.0 |
| SW-480_Colon adenocarcinoma | 0.2 |
| NCI-SNU-5_Gastric ca | 2 7 |
| KATO III_Stomach | 2.0 |
| NCI-SNU-16_Gastric ca. | 0.0 |
| NCI-SNU-1_Gastric ca. | 0.7 |
| RF-1_Gastric adenocarcinoma | 8.6 |
| RF-48_Gastric adenocarcinoma | 12.9 |
| MKN-45_Gastric ca. | 2.0 |
| NCI-N87_Gastric ca. | 1.8 |
| OVCAR-5_Ovarian ca. | 4.3 |
| RL95-2_Uterine carcinoma | 4.4 |
| HelaS3_Cervical adenocarcinoma | 12.9 |
| Ca Ski_Cervical epidermoid carcinoma | 0.0 |
| (metastasis) | |
| ES-2_Ovarian clear cell carcinoma | 0.0 |
| Ramos/6h stim_Stimulated with | 1.1 |
| PMA/ionomycin 6h | |
| Ramos/14h stim_Stimulated with | 2.3 |
| PMA/ionomycin 14h | |
| MEG-01_Chronic myelogenous | 1.5 |
| leukemia(megokaryoblast) | |
| Raji_Burkitt's lymphoma | 0.2 |
| Daudi_{—Burkitt's lymphoma} | 1.5 |
| U266_B-cell plasmacytoma/mycloma | 6.4 |
| CA46_Burkitt's lymphoma | 5.3 |
| RL_non-Hodgkin's B-cell lymphoma | 0.0 |
| JM1_pre-B-cell lymphoma/leukemia | 5.9 |
| Jurkat_T cell leukemia | 31.0 |
| TF-1_Erythroleukemia | 0.0 |
| HUT 78_T-cell lymphoma | 3.7 |
| U937_Histiocytic lymphoma | 0.0 |
| KU-812_Myelogenous leukemia | 0.5 |
| 769-P_Clear cell renal ca. | 0.0 |
| Caki-2_Clear cell renal ca. | 0.4 |
| SW 839_Clear cell renal ca. | 0.0 |
| G401_Wilms' tumor | 0.3 |
| Hs766T_Pancreatic ca.(LN metastasis) | 27.5 |
| CAPAN-1_Pancreatic adenocarcinoma | 1.7 |
| (liver metastasis) | |
| SU86.86_Pancreatic carcinoma(liver | 6.0 |
| metastasis) | |
| BxPC-3_Pancreatic adenocarcinoma | 0.0 |
| HPAC_Pancreatic aclenocarcinoma | 7.5 |
| MIA PaCa-2_Pancreatic ca. | 0.0 |
| CFPAC-1_Pancreatic ductal | 3.3 |
| adenocarcinoma | |
| PANC-1_Pancreatic epithelioid ductal | 0.7 |
| ca. | |
| T24_Bladder ca.(transitional cell) | 19.1 |
| 5637_Bladder ca. | 4.7 |
| HT-1197 Bladder ca. | 8.2 |
| UM-UC-3_Bladder ca.(transitional | 0.0 |
| cell) | |
| A204_Rhabdomyosarcoma | 0.1 |
| HT-1080_Fibrosarcoma | 0.0 |
| MG-63_Osteosarcoma(bone) | 1.1 |
| SK-LMS-1_Leiomyosarcoma(vulva) | 0 2 |
| SJRH30_Rhabdomyosarcoma(met to | 0.0 |
| bone marrow) | |
| A431_Epidermoid ca. | 0.4 |
| WM266-4_Melanoma | 0.0 |
| DU 145_Prostate | 0.1 |
| MDA-MB-468_Breast | 0.6 |
| adenocarcinoma | |
| SSC-4_Tongue | 0.4 |
| SSC-9_Tongue | 0.0 |
| SSC-15_Tongue | 3.7 |
| CAL 27_Squamous cell ca. of tongue | 2.6 |

[0738] General_screening_panel_v1.5 Summary: Ag4881 Highest expression of this gene is seen in the cerebellum (CT=27.5). Moderate levels of expression are also seen in all regions of the CNS examined. Moderate to low levels of expression of this gene are also seen in metabolic tissues, including pancreas, thyroid, adrenal, pituitary, adipose, fetal and adult heart, skeletal muscle, and liver. This gene encodes a member of the ATP-binding cassette (ABC) transporter family. The ABC superfamily comprises of myriad transmembrane proteins involved in the transport of vitamins, peptides, steroid hormones, ions, sugars, and amino acids (ref. 1). Known genetic diseases resulting from dysfunctional ABC transporters include cystic fibrosis, Zellweger syndrome, adrenoleukodystrophy, multidrug resistance, Stargardt macular dystrophy, Tangier disease (TD) and familial HDL deficiency (FHA) (ref. 2, 3). Recently, it has been shown that functional loss of ABCA1, a transporter belonging to ABCA subfamily, in mice causes severe placental malformation, aberrant lipid distribution, and kidney glomeruloniephritis, as well as, high-density lipoprotein cholesterol deficiency (ref 3). This gene is expressed in large number of the normal tissue used in this panel. In analogy to ABCA1, this gene may also play a wider role in lipid metabolism, renal inflammation, and cardiovascular disease and CNS disorders.

[0739] References.

[0740] 1. Higgins C F. (1992) Annu Rev Cell Biol 8:67-113 PMID: 1282354

[0741] 2. Decottignies A, Goffeau A. (1997) Nat Genet 15(2):137-45. PMID: 9020838

[0742] 3. Christiansen-Weber T A, Voland J R, Wu Y, Ngo K, Roland B L, Nguyen S, Peterson P A, Fung-Leung W P.(2000) Am J Pathiol 2000 September,157(3):1017-29

[0743] Oncology_cell line_screening_panel_v3.1 Summary: Ag4881 Highest levels of expression are seen in a lung cancer cell line (CT=27.5). Moderate levels of expression are also seen in the cerebellum, in agreement with Panel 1.5. This expression in the cerebellum suggests that this gene product may be a useful and specific target of drugs for the treatment of CNS disorders that have this brain region as the site of pathology, such as autism and the ataxias.

[0744] F. CG119674-02: Orphan Neurotransmitter Transporter NTT5.

[0745] Expression of gene CG119674-02 was assessed using the primer-probe set Ag7022, described in Table FA.

The application's sequence listing, which the Patent Office published only in electronic form, follows.

SEQUENCE LISTING (369 sequences)

SEQ ID NO: 1 - DNA, 975 bp, Homo sapiens
  CDS (43)..(783)
gtccttggaggccagaggggactctgagcatcggaaagcaggatgcctggtttgcttttatgtgaaccgacagagctttacaacatcctgaatcaggccacaaaactctccagattaacagaccccaactatctctgtttattggatgtccgttccaaatgggagtatgacgaaagccatgtgatcactgcccttcgagtgaagaagaaaaataatgaatatcttctcccggagtctgtggacctggagtgtgtgaagtactgcgtggtgtatgataacaacagcagcaccctggagatactcttaaaagatgatgatgatgattcagactctgatggtgatggcaaagatcttgtgcctcaagcagccattgagtatggcaggatcctgacccgcctcacccaccaccccgtctacatcctgaaagggggctatgagcgcttctcaggcacgtaccactttctccggacccagaagatcatctggatgcctcaggaactggatgcatttcagccataccccattgaaatcgtgccagggaaggtcttcgttggcaatttcagtcaagcctgtgaccccaagattcagaaggacttgaaaatcaaagcccatgtcaatgtctccatggatacagggcccttttttgcaggcgatgctgacaagcttctgcacatccggatagaagattccccggaagcccagattcttcccttcttacgccacatgtgtcacttcattgggtatcagccgcagttgtgccgccatcatagcctacctcatgcatagtaacgagcagaccttgcagaggtcctgggcctatgtcaagaagtgcaaaaacaacatgtgtccaaatcggggattggtgagccagctgctggaatgggagaagactatccttggagattccatcacaaacatcatggatccgctctactgatcttctccgaggcccaccgaagggtactgaagagcctc

SEQ ID NO: 2 - protein, 247 aa, Homo sapiens
MPGLLLCEPTELYNILNQATKLSRLTDPNYLCLLDVRSKWEYDESHVITALRVKKKNNEYLLPESVDLECVKYCVVYDNNSSTLEILLKDDDDDSDSDGDGKDLVPQAAIEYGRILTRLTHHPVYILKGGYERFSGTYHFLRTQKIIWMPQELDAFQPYPIEIVPGKVFVGNFSQACDPKIQKDLKIKAHVNVSMDTGPFFAGDADKLLHIRIEDSPEAQILPFLRHMCHFIGYQPQLCRHHSLPHA

SEQ ID NO: 3 - DNA, 1369 bp, Homo sapiens
  CDS (72)..(725)
caccgagacgcgccggcggaccgcgggcgagtgcagccggtgacccggcgagaggcggcgccgctcccaagatgtcgcagacggccatgtccgaaacctacgattttttgtttaagttcttggttattggaaatgcaggaactggcaaatcttgcttacttcatcagtttattgaaaaaaaattcaaagatgactcaaatcatacaataggagtggaatttggttcaaagataataaatgttggtggtaaatatgtaaagttacaaatatgggatacagcaggacaagaacgattcaggtccgtgacgagaagttattaccgaggcgcggccggggctctcctcgtctatgatatcaccagccgagaaacctacaatgcgcttactaattggttaacagatgcccgaatgctagcgagccagaacattgtgatcatcctttgtggaaacaagaaggacctggatgcagatcgtgaagttaccttcttagaagcctccagatttgctcaagaaaatgagctgatgtttttggaaacaagtgcgctcacaggggagaatgtagaagaggcttttgtacagtgtgcaagaaaaatacttaacaaaatcgaatcaggtgagctggacccagaaagaatgggctcaggtattcagtacggagatgctgccttgagacagctgaggtcaccgcggcgcgcacaggccccgaacgctcaggagtgtggttgttaggagagcacacaggtgttcatacagtggcatttgggacacaatcgttggaacctgaagaatctgaagttttttttaccaccatctttttctactctgtatggaagtagatctttatggggaaaagagaatttggggtgttctgcaagccagtcaaagtggcacagcaaatcatataaatcgaattaaatggacaacaccgttagatgtgtatgtaaaaattttctgtttcatatttttcctttcactttcggtttaaaacatgctatatgtactgtatgtcctgtagcccagtgcggctccacagcatggaatctgatgtatgatatgatagaatgtggcactaaatgcagtttcagattttattttttttaatcatatgaactaaaattgtcaattgtgaggtgtgcttttctcatcatgttggttatattgcacaattggttatatttatgacctgatattcaaagactctggcattgatagccagtgtgttttcttatttaactccgtttactacattctacatggtgtttacgtgatccacacttgaaatactagatcagtagacattcactaatataccaaaataaaatgaaaaattgagtttttccgtgaaaaaaaaaaaaaaaaaaaaaaaaaaa

SEQ ID NO: 4 - protein, 218 aa, Homo sapiens
MSQTAMSETYDFLFKFLVIGNAGTGKSCLLHQFIEKKFKDDSNHTIGVEFGSKIINVGGKYVKLQIWDTAGQERFRSVTRSYYRGAAGALLVYDITSRETYNALTNWLTDARMLASQNIVIILCGNKKDLDADREVTFLEASRFAQENELMFLETSALTGENVEEAFVQCARKILNKIESGELDPERMGSGIQYGDAALRQLRSPRRAQAPNAQECGC

SEQ ID NO: 5 - DNA, 1747 bp, Homo sapiens
  CDS (209)..(748)
gccggacggagggtggagggccctgcgcctgcgcggagctggagtccggctgggccgcagccgctgggagaccggcggttgccgtggggaccggtcgggcccctccctcctccggtcccccgccccaggtccttccccaccgagacgcgccggcggaccgcgggcgagtgcagccggtgacccggcgagaggcggcgccgctcccaagatgtcgcagacggccatgtccgaaacctacgattttttgtttaagttcttggttattggaaatgcaggaactggcaaatcttgcttacttcatcagtttattgaaaaaaaaatgtccgtgacgagaagttattaccgaggcgcggccggggctctcctcgtctatgatatcaccagccgagaaacctacaatgcgcttactaattggttaacagatgcccgaatgctagcgagccagaacattgtgatcatcctttgtggaaacaagaaggacctggatgcagatcgtgaagttaccttcttagaagcctccagatttgctcaagaaaatgagctgatgtttttggaaacaagtgcgctcacaggggagaatgtagaagaggcttttgtacagtgtgcaagaaaaatacttaacaaaatcgaatcaggtgagctggacccagaaagaatgggctcaggtattcagtacggagatgctgccttgagacagctgaggtcaccgcggcgcgcacaggccccgaacgctcaggagtgtggttgttaggagagcacacaggtgttcatacagtggcatttgggacacaatcgttggaacctgaagaatctgaagttttttttaccaccatctttttctactctgtatggaagtagatctttatggggaaaagagaatttggggtgttctgcaagccagtcaaagtggcacagcaaatcatataaatcgaattaaatggacaacaccgttagatgtgtatgtaaaaattttctgtttcatatttttcctttcactttcggtttaaaacatgctatatgtactgtatgtcctgtagcccagtgcggctccacagcatggaatctgatgtatgatatgatagaatgtggcactaaatgcagtttcagattttattttttttaatcatatgaactaaaattgtcaattgtgaggtgtgcttttctcatcatgttggttatattgcacaattggttatatttatgacctgatattcaaagactctggcattgatagccagtgtgttttcttatttaactccgtttactacattctacatggtgtttacgtgatccacacttgaaatactagatcagtagacattcactaatataccaaaataaaatgaaaaattgagtttttccgtgaactttatactgtccagctctgttgattttaaagcctcttcatccaggtcagttcaggaagtatatctggagtacctgctctgtttttggctgtgagactagcactaaggattctggtacctttacccaaacctactgggctactaatacttctctcagcagttgatcaaatacaatagaccatgtaagctggggccgctcatccacttccagtttgctggtctccctgctagaaaacacattgtactgtgctttttctggaattcagtataatggcatcactgcctgtttttcacatcttttgtttcctgttcattttaaggaaacctactaaatccagttaatattaaatggacaccactcaaaaaaaaaaaaaaaaaaa

SEQ ID NO: 6 - protein, 180 aa, Homo sapiens
MSQTAMSETYDFLFKFLVIGNAGTGKSCLLHQFIEKKMSVTRSYYRGAAGALLVYDITSRETYNALTNWLTDARMLASQNIVIILCGNKKDLDADREVTFLEASRFAQENELMFLETSALTGENVEEAFVQCARKILNKIESGELDPERMGSGIQYGDAALRQLRSPRRAQAPNAQECGC

SEQ ID NO: 7 - DNA, 687 bp, Homo sapiens
  CDS (1)..(666)
cgcggatccaccatgtcgcagacggccatgtccgaaacctacgattttttgtttaagttcttggttattggaaatgcaggaactggcaaatcttgcttacttcatcagtttattgaaaaaaaattcaaagatgactcaaatcatacaataggagtggaatttggttcaaagataataaatgttggtggtaaatatgtaaagttacaaatatgggatacagcaggacaagaacgattcaggtccgtgacgagaagttattaccgaggcgcggccggggctctcctcgtctatgatatcaccagccgagaaacctacaatgcgcttactaattggttaacagatgcccgaatgctagcgagccagaacattgtgatcatcctttgtggaaacaagaaggacctggatgcagatcgtgaagttaccttcttagaagcctccagatttgctcaagaaaatgagctgatgtttttggaaacaagtgcgctcacaggggagaatgtagaagaggcttttgtacagtgtgcaagaaaaatacttaacaaaatcgaatcaggtgagctggacccagaaagaatgggctcaggtattcagtacggagatgctgccttgagacagctgaggtcaccgcggcgcgcacaggccccgaacgctcaggagtgtggttgttaggcggccgcttttttcctt

SEQ ID NO: 8 - protein, 222 aa, Homo sapiens
RGSTMSQTAMSETYDFLFKFLVIGNAGTGKSCLLHQFIEKKFKDDSNHTIGVEFGSKIINVGGKYVKLQIWDTAGQERFRSVTRSYYRGAAGALLVYDITSRETYNALTNWLTDARMLASQNIVIILCGNKKDLDADREVTFLEASRFAQENELMFLETSALTGENVEEAFVQCARKILNKIESGELDPERMGSGIQYGDAALRQLRSPRRAQAPNAQECGC

SEQ ID NO: 9 - DNA, 1185 bp, Homo sapiens
  CDS (181)..(1065)
gtaatatcctctctcccccagatattaggaacagtatcacagggggtggtacactcccttagatattgggagtaatatcatcctcttgccttctggatattaggaacaatatcccagaaggcgtgtacaaccccctgcgatactgggagacagcccgtcctcactgggctctccctgtccatgtacctggtcacgatgctgaggaacctgttcatcatcctggctggcagctctgacccccacttccacacccccatgtacttcttcctctccaacctgtcctgggctgacattggtttcacctcggccacagttcccaagatgattgtggacatgcagtcgcatagcagagtcatctcttatgcgggctgcctgacacagatgtctttctttgtcctttttgcatgtatagaagacatgctcctgactctgatggcctatgaccgatttgtggccatctgccaccccctgcactaccgagtcatcatgaatcctcacctctgtgtcttcttagttttggtgtcctttttccttagcctgttggattcccagctgcacagctggattgtgttacaactcaccttcttcaagaatgtggaaatctataattttttctgtgacccatctcaacttctcaaccttgcctgttctgacagcatcatcaataacatattatgtattttagatatccctatatttggttttcttcccatttcagggatccttttgtcttactataaaattgtctcctccattccaagaattccatcgtcagatgggaagtataaagccttctccacctgtggctctcacctggcagttgtttgcttattttatgaaacaggcattggcgtgtacctgacttcagctgtgtcatcatctcccaggaatggagtggtggcatcagtgatgtacgctgtggtcatccccatgctgaaccctttcatctacagcctgagaaacagggacattcatagtgccctgtggaggctgcgcagcagaacagtcaaatctcatgatctgttccatcctttctcttgtgtgagtaagaaagggcaaccacattaaatctgtacatctgcaaatcctaacccctttgtcacattatttttgttgcttgatggttttattcctttccacatttcctatgtgaattgcttctttgttatgcctttaatggaatgg

SEQ ID NO: 10 - protein, 295 aa, Homo sapiens
MYLVTMLRNLFIILAGSSDPHFHTPMYFFLSNLSWADIGFTSATVPKMIVDMQSHSRVISYAGCLTQMSFFVLFACIEDMLLTLMAYDRFVAICHPLHYRVIMNPHLCVFLVLVSFFLSLLDSQLHSWIVLQLTFFKNVEIYNFFCDPSQLLNLACSDSIINNILCILDIPIFGFLPISGILLSYYKIVSSIPRIPSSDGKYKAFSTCGSHLAVVCLFYETGIGVYLTSAVSSSPRNGVVASVMYAVVIPMLNPFIYSLRNRDIHSALWRLRSRTVKSHDLFHPFSCVSKKGQPH

SEQ ID NO: 11 - DNA, 700 bp, Homo sapiens
  CDS (90)..(644)
ctctaatatgattccacctgttgggctctttcttccatttgcctccgcagatagtgtctgccttctggagagctgaccaaacactaaggatgctgaagttccgaacagtccatgggggcctgaggctcctgggaatccgccgaacctccaccgcccccgctgcctccccaaatgtccggcgcctggagtataagcccatcaagaaagtcatggtggccaacagaggtgagattgccatccgtgtgttccgggcctgcacggagctgggcatccgcaccgtagccatctactctgagcaggacacgggccagatgcaccggcagaaagcagatgaagcctatctcatcggccgcggcctggcccccgtgcaggcctacctgcacatcccagacatcatcaaggtggccaaggagaacaacgtagatgcagtgcaccctggctacgggttcctttctgagcgagcgaaggtgatagacatcaaagtggtggcaggggccaaggtggccaagggccagcccctgtgtgtgctcagtgccatgaagatggagactgtggtgacctcacccatggagggtactgtccgcaaggttcatgtgaccaaggacatgacactggaaggtgacgacctcatcctggagatcgagtgatcttgccccagaccggcagcctggccatccccaagccttcaacagaagctgtg

SEQ ID NO: 12 - protein, 185 aa, Homo sapiens
MLKFRTVHGGLRLLGIRRTSTAPAASPNVRRLEYKPIKKVMVANRGEIAIRVFRACTELGIRTVAIYSEQDTGQMHRQKADEAYLIGRGLAPVQAYLHIPDIIKVAKENNVDAVHPGYGFLSERAKVIDIKVVAGAKVAKGQPLCVLSAMKMETVVTSPMEGTVRKVHVTKDMTLEGDDLILEIE

SEQ ID NO: 13 - DNA, 2133 bp, Homo sapiens
  CDS (31)..(1827)
gaattccggtttcttcctaaaaaatgtctgatggccgctttctcggtcggcaccgccatgaatgccagcagttactctgcagagatgacggagcccaagtcggtgtgtgtctcggtggatgaggtggtgtccagcaacatggaggccactgagacggacctgctgaatggacatctgaaaaaagtagataataacctcacggaagcccagcgcttctcctccttgcctcggagggcagctgtgaacattgaattcagggacctttcctattcggttcctgaaggaccctggtggaggaagaaaggatacaagaccctcctgaaaggaatttccgggaagttcaatagtggtgagttggtggccattatgggtccttccggggccgggaagtccacgctgatgaacatcctggctggatacagggagacgggcatgaagggggccgtcctcatcaacggcctgccccgggacctgcgctgcttccggaaggtgtcctgctacatcatgcaggatgacatgctgctgccgcatctcactgtgcaggaggccatgatggtgtcggcacatctgaagcttcaggagaaggatgaaggcagaagggaaatggtcaaggagatactgacagcgctgggcttgctgtcttgcgccaacacgcggaccgggagcctgtcaggtggtcagcgcaagcgcctggccatcgcgctggagctggtgaacaaccctccagtcatgttcttcgatgagcccaccagcggcctggacagcgcctcctgcttccaggtggtctcgctgatgaaagggctcgctcaagggggtcgctccatcatttgcaccatccaccagcccagcgccaaactcttcgagctgttcgaccagctttacgtcctgagtcaaggacaatgtgtgtaccggggaaaagtctgcaatcttgtgccatatttgagggatttgggtctgaactgcccaacctaccacaacccagcagattttgtcatggaggttgcatccggcgagtacggtgatcagaacagtcggctggtgagagcggttcgggagggcatgtgtgactcagaccacaagagagacctcgggggtgatgccgaggtgaacccttttctttggcaccgcccctctgaagaggtaaagcagacaaaacgattaaaggggttgagaaaggactcctcgtccatggaaggctgccacagcttctctgccagctgcctcacgcagttctgcatcctcttcaagaggaccttcctcagcatcatgagggactcggtcctgacacacctgcgcatcacctcgcacattgggatcggcctcctcattggcctgctgtacttggggatcgggaacgaaaccaagaaggtcttgagcaactccggcttcctcttcttctccatgctgttcctcatgttcgcggccctcatgcctactgttctgacatttcccctggagatgggagtctttcttcgggaacacctgaactactggtacagcctgaaggcctactacctggccaagaccatggcagacgtgccctttcagatcatgttcccagtggcctactgcagcatcgtgtactggatgacgtcgcagccgtccgacgccgtgcgctttgtgctgtttgccgcgctgggcaccatgacctccctggtggcacagtccctgggcctgctgatcggagccgcctccacgtccctgcaggtggccactttcgtgggcccagtgacagccatcccggtgctcctgttctcggggttcttcgtcagcttcgacaccatccccacgtacctacagtggatgtcctacatctcctatgtcaggtagcgggcgtggggcacgcatggcgtggggaccgagggtgacgggggaagaaccgtctccaacagcgtgaggggctcacaaaagccactctgggctgctggccaagagcagattacacatctgaggatccaggccttccatcttcctgctagttccacctcctcctaccctcaccaacacacacacactaaacaaggaggccacacaaaccagcgcttcacacccggagagccatggcaggaccaagtgttctggacgttgccgagagctgcctttggtggaagcgcttccatcttttaggaacgt

SEQ ID NO: 14 - protein, 599 aa, Homo sapiens
MAAFSVGTAMNASSYSAEMTEPKSVCVSVDEVVSSNMEATETDLLNGHLKKVDNNLTEAQRFSSLPRRAAVNIEFRDLSYSVPEGPWWRKKGYKTLLKGISGKFNSGELVAIMGPSGAGKSTLMNILAGYRETGMKGAVLINGLPRDLRCFRKVSCYIMQDDMLLPHLTVQEAMMVSAHLKLQEKDEGRREMVKEILTALGLLSCANTRTGSLSGGQRKRLAIALELVNNPPVMFFDEPTSGLDSASCFQVVSLMKGLAQGGRSIICTIHQPSAKLFELFDQLYVLSQGQCVYRGKVCNLVPYLRDLGLNCPTYHNPADFVMEVASGEYGDQNSRLVRAVREGMCDSDHKRDLGGDAEVNPFLWHRPSEEVKQTKRLKGLRKDSSSMEGCHSFSASCLTQFCILFKRTFLSIMRDSVLTHLRITSHIGIGLLIGLLYLGIGNETKKVLSNSGFLFFSMLFLMFAALMPTVLTFPLEMGVFLREHLNYWYSLKAYYLAKTMADVPFQIMFPVAYCSIVYWMTSQPSDAVRFVLFAALGTMTSLVAQSLGLLIGAASTSLQVATFVGPVTAIPVLLFSGFFVSFDTIPTYLQWMSYISYVR

SEQ ID NO: 15 - DNA, 1940 bp, Homo sapiens
  CDS (19)..(1449)
ccagagagtctgtgtgagatgaagacagaggcccagccttcgacatccttgctggcaaacacctcatggactggcacagtgatttctgacagtgtcccaggaagtcaaacgtgggaagacaagggttcattgacccggcctgcaacatctcggacctcagaggcccaagtttcagcagcccgggttgcagaggctcaggccaggaccagtcagcccaagcaaatttctgtattggaggcgttaactgcctcagccctgaaccagaaacccacgcatgagaaggtgcagatgacagagaagaaagagagtgaggcagtttcgctgccatctacatcttcatgctgttcctggtcggggttcctcttctcttcctggagatggcagctggtcagagcatgcgtcagggtggcatgggtgtatggaagatcattgccccctggattggtggtgtggggtattctagcttcatggaatgctgaaatacttttaaagctgataaacctagggaaactgcctcctgatgccaagccccctgtcaacctgctttacaacccaacctccatctacaatgcctggctcagtggccttccccagcacatcaaaagcatggttctccgcgaggtgactgagtgcaacatagagactcagtttcttaaggctagcgagggcccaaagtttgcattcctgtcctttgttgaagccatgtccttccttcctccgtctgtcttctggtcttttatcttcttcctgatgttgctggccatggggctgagcagcgcaatagggattatgcagggcatcattactccactccaggacaccttctctttcttcaggaaacatacaaagctgctcatagtgggagtctttttgctcatgttcgtgtgcggcctcttcttcactcgaccttcaggcagctacttcatcagactgctgagtgactactggatagtcttccccatcatcgtcgttgtcgtatttgaaaccatggctgtatcctgggcctatggggccaggaggttccttgcagacctgacgatcctgttgggccaccccatctctcccatctttggttggctgtggccccatctgtgtccagttgtgctgctaatcatctttgtgaccatgatggttcatctttgtatgaagccgattacctacatgtcctgggactcaagcacctcaaaagaggtgcttcgaccatacccaccgtgggcactgctcttgatgatcaccctttttgccattgtcatcctccccatccctgcatactttgtatactgccgcatacataggattcccttcaggcccaagagcggagacgggcctatgacagcctccacatccctacccctaagtcaccagctaacacccagtaaagaggttcaaaaggaagaaattctacaagttgatgaaacaaagtacccatcaacttgtaatgtgacttcctaacttcattaatttggcttcacataacatatcccttagaacagatccaatagacaactcttaatatcagcttgcaactgttgatctccctggatccagaaccacttttatttccaagaggaggggcattctttgggggtgttcatggggcctggacttgcaatcccttcctgggtcccatcttacctggtgaccaccatcattgttttccccatcctcttcctcaacacacatacatgcacaacacatatacaatactagtgatgtctaccagtcctgctacttctggggtgcctgtctcctggaatggagctggaggagcaatgctgttggtgaataaatcagtctactggaactccaaggactggatgtaagcagatctttttttcctatagatgtctcagatgttcagttttcctgtcacaaggcttccagtctgtattagttcattttcacactgataatacagacatacctgaaactgggaaaaa

SEQ ID NO: 16 - protein, 477 aa, Homo sapiens
MKTEAQPSTSLLANTSWTGTVISDSVPGSQTWEDKGSLTRPATSRTSEAQVSAARVAEAQARTSQPKQISVLEALTASALNQKPTHEKVQMTEKKESEAVSLPSTSSCCSWSGFLFSSWRWQLVRACVRVAWVYGRSLPPGLVVWGILASWNAEILLKLINLGKLPPDAKPPVNLLYNPTSIYNAWLSGLPQHIKSMVLREVTECNIETQFLKASEGPKFAFLSFVEAMSFLPPSVFWSFIFFLMLLAMGLSSAIGIMQGIITPLQDTFSFFRKHTKLLIVGVFLLMFVCGLFFTRPSGSYFIRLLSDYWIVFPIIVVVVFETMAVSWAYGARRFLADLTILLGHPISPIFGWLWPHLCPVVLLIIFVTMMVHLCMKPITYMSWDSSTSKEVLRPYPPWALLLMITLFAIVILPIPAYFVYCRIHRIPFRPKSGDGPMTASTSLPLSHQLTPSKEVQKEEILQVDETKYPSTCNVTS

SEQ ID NO: 17 - DNA, 1994 bp, Homo sapiens
  CDS (19)..(1503)
ccagagagtctgtgtgagatgaagacagaggcccagccttcgacatccttgctggcaaacacctcatggactggcacagtgatttctgacagtgtcccaggaagtcaaacgtgggaagacaagggttcattgacccggtctgcaacatcttggacctcagaggcccaagtttcagcagcccgggttgcagaggctcaggccaggaccagtcagcccaagcaaatttctgtattgggggcgttaactgcctcagccctgaaccagaaacccacgcatgagaaggtgcagatgacagagaagaaagagagtgaggtcctccttgcccgtccgttctggtccagcaaaactgagtatattctggctcaggcagtttcgctgccatctacatcttcatgctgttcctggtcggggttcctcttctcttcctggagatggcagctggtcagagcatgcgtcagggtggcatgggtgtatggaagatcattgccccctggattggtggtgtggggtattctagcttcatggaatgctgaaatacttttaaagctgataaacctagggaaactgcctcctgatgccaagccccctgtcaacctgctttacaacccaacctccatctacaatgcctggctcagtggccttccccagcacatcaaaagcatggttctccgcgaggtgactgagtgcaacatagagactcagtttcttaaggctagcgagggcccaaagtttgcattcctgtcctttgttgaagccatgtccttccttcctccgtctgtcttctggtcttttatcttcttcctgatgttgctggccatggggctgagcagcgcaatagggattatgcagggcatcattactccactccaggacaccttctctttcttcaggaaacatacaaagctgctcatagtgggagtctttttgctcatgttcgtgtgcggcctcttcttcactcgaccttcaggcagctacttcatcagactgctgagtgactactggatagtcttccccatcatcgtcgttgtcgtatttgaaaccatggctgtatcctgggcctatggggccaggaggttccttgcagacctgacgatcctgttgggccaccccatctctcccatctttggttggctgtggccccatctgtgtccagttgtgctgctaatcatctttgtgaccatgatggttcatctttgtatgaagccgattacctacatgtcctgggactcaagcacctcaaaagaggtgcttcgaccatacccaccgtgggcactgctcttgatgatcaccctttttgccattgtcatcctccccatccctgcatactttgtatactgccgcatacataggattcccttcaggcccaagagcggagacgggcctatgacagcctccacatccctacccctaagtcaccagctaacacccagtaaagaggttcaaaaggaagaaattctacaagttgatgaaacaaagtacccatcaacttgtaatgtgacttcctaacttcattaatttggcttcacataacatatcccttagaacagatccaatagacaactcttaatatcagcttgcaactgttgatctccctggatccagaaccacttttatttccaagaggaggggcattctttgggggtgttcatggggcctggacttgcaatcccttcctgggtcccatcttacctggtgaccaccatcattgttttccccatcctcttcctcaacacacatacatgcacaacacatatacaatactagtgatgtctaccagtcctgctacttctggggtgcctgtctcctggaatggagctggaggagcaatgctgttggtgaataaatcagtctactggaactccaaggactggatgtaagcagatctttttttcctatagatgtctcagatgttcagttttcctgtcacaaggcttccagtctgtattagttcattttcacactgataatacagacatacctgaaactgggaaaaa

SEQ ID NO: 18 - protein, 495 aa, Homo sapiens
MKTEAQPSTSLLANTSWTGTVISDSVPGSQTWEDKGSLTRSATSWTSEAQVSAARVAEAQARTSQPKQISVLGALTASALNQKPTHEKVQMTEKKESEVLLARPFWSSKTEYILAQAVSLPSTSSCCSWSGFLFSSWRWQLVRACVRVAWVYGRSLPPGLVVWGILASWNAEILLKLINLGKLPPDAKPPVNLLYNPTSIYNAWLSGLPQHIKSMVLREVTECNIETQFLKASEGPKFAFLSFVEAMSFLPPSVFWSFIFFLMLLAMGLSSAIGIMQGIITPLQDTFSFFRKHTKLLIVGVFLLMFVCGLFFTRPSGSYFIRLLSDYWIVFPIIVVVVFETMAVSWAYGARRFLADLTILLGHPISPIFGWLWPHLCPVVLLIIFVTMMVHLCMKPITYMSWDSSTSKEVLRPYPPWALLLMITLFAIVILPIPAYFVYCRIHRIPFRPKSGDGPMTASTSLPLSHQLTPSKEVQKEEILQVDETKYPSTCNVTS

SEQ ID NO: 19 - DNA, 4795 bp, Homo sapiens
  CDS (352)..(1869)
acagccgcgcgacgccgccgccttagaacgcctttccagtactgctagcagcagcccgaccacgcgttaccgcacgctcgcgcctttcccttgacacggcggacgccggaggattggggcggcaatttgtcttttccttttttattaaaattatttttcctgcctgttgttggatttggggaaattttttgtttgttttttatgatttgtatttgactgagagaaacccactgaagacgtctgcgtgagaatagagaccaccgaggccgactcgcgggccgctgcacccaccgccaaggacaaaaggagcccagcgctactagctgcacccgattcctcccagtgcttagcatgaagaaggccgaaatgggacgattcagtatttccccggatgaagacagcagcagctacagttccaacagcgacttcaactactcctaccccaccaagcaagctgctctgaaaagccattatgcagatgtagatcctgaaaaccagaactttttacttgaatcgaatttggggaagaagaagtatgaaacagaatttcatccaggtactacttcctttggaatgtcagtatttaatctgagcaatgcgattgtgggcagtggaatccttgggctttcttatgccatggctaatactggaattgctctttttataattctcttgacatttgtgtcaatattttccctgtattctgttcatctccttttgaagactgccaatgaaggagggtctttattatatgaacaattgggatataaggcatttggattagttggaaagcttgcagcatctggatcaattacaatgcagaacattggagctatgtcaagctacctcttcatagtgaaatatgagttgcctttggtgatccaggcattaacgaacattgaagataaaactggattgtggtatctgaacgggaactatttggttctgttggtgtcattggtggtcattcttcctttgtcgctgtttagaaatttaggatatttgggatataccagtggcctttccttgttgtgtatggtgttctttctgattgtggtcatttgcaagaaatttcaggttccgtgtcctgtggaagctgctttgataattaacgaaacaataaacaccaccttaacacagccaacagctcttgtacctgctttgtcacataacgtgactgaaaatgactcttgcagacctcactattttattttcaactcacagactgtctatgctgtgccaattctgatcttttcatttgtctgtcatcctgctgttcttcccatctatgaagaactgaaagaccgcagccgtagaagaatgatgaatgtgtccaagatttcattttttgctatgtttctcatgtatctgcttgccgccctctttggatacctaacattttacgaacatgttgagtcagaattgcttcatacctactcttctatcttgggaactgatattcttcttctcattgtccgtctggctgtgttaatggctgtgaccctgacagtaccagtagttattttcccaatccggagttctgtaactcacttgttgtgtgcatcaaaagatttcagttggtggcgtcatagtctcattacagtgtctatcttggcatttaccaatttacttgtcatctttgtcccaactattagggatatctttggttttattggtgcatctgcagcttctatgttgatttttattcttccttctgccttctatatcaagttggtgaagaaagaacctatgaaatctgtacaaaagattggggctttgttcttcctgttaagtggtgtactggtgatgaccggaagcatggccttgattgttttggattgggtacacaatgcacctggaggtggccattaattggcaccactcaaactcaaactcagtccatctgatgccagtgttgagtaaactcaactactatgaaatttcacctaatgttttcagtttcacttccttttgaagtgcagattcctcgctggttcttctgagtgcagaataagtgaacttttttgttttgttttgtttttttaagaaacttatctgtatgttagaaatggatatgaacaacaaaaccacgagtctcgggttaagggaagtgacaattttattcccattccagagaatggacaaactcttaacttttatcaagccacatgcttggctgtgtcattgtttaacttggatattttatgattttacttgaatgtgcctaatggaaccatttgatgtgagaaacaattctttttaatttacagcaaaatattgaataaccattgacaaaaacactattattttttgtaccaaaaatacttaaagacctcagaagcactcttttacttttaagaaattgcttttttgaactttattcagaagcagttatcaataaattccataaaataatgtcattggtatttaaaaatgaatattaatataatgaaatggtttgcctttttgtaggcataataagccaaatacttttttacccaaaataatttttagagaaaatgatgtaatgaaaaattgtaccatgaattaggagcatagttttttccatttaaacgtcaccattacttaaaagatgattgattattgctataccaaatcagatgaactctgttcatcacttttcttctctgtccccaaacaatttggttcattcagactgaaatgtttgtgtcttcaacttattagaatggaagataatgcagatatttctgtgggaaataaaataactaattttgaggtaccaaatagtgcaattgggtaaaacagggtttattcagttgcatctgtctccagtgttgtattgacagctctgggtctttttttgggccagcccttttttgacattgcttccagcagtggaaaatgggcatttgatggcaataggccaaaattattgtgtccagagagtacactttttcaaaatgctcacctactggaagtgtgaattacttgacaatgtatggcttagttgtgttcatgttttgtctacagtagaggtctaatccacaggttacacctatgtttgatatgatataagttctctttgcgtaggccactgggtttctcatgcagtaagctttataaaaactcatttgcactggactgtcatctcattcttgtacaacgtagaattacttgtttacatccaacaaatggttagctagggaaaacagtgcaaactgagtgttagtagtcattttggtccaactgcatgtcaacccttccatttcaatcccagttagaaatgaaaataattactttgaaacttggctttaagagcacatttatcgtacgtcacagtgtatggtgaatatattattaaataatgtggtacttcgctcatcaggcataatgtctaaaatctaatatacataattccattaagtggttgaaggaagcaaataatggaattgtcaattggtcatctggctgtaaggtttgcccttgaactaaaaatgttgtttggggcaagggccagaaatgtggagacatggtttttgttacgcattcttgtattatatgtgactaaatttacaaacaagatacatgtgtaattaaagacccttatggaactggaagacgtcttgtagtgctacattgggtgaaaccgttggtccatttttgtcctgtttctatgaagataaaataattgggggccatctagaaatagaaaggcagtgggaagacagattctacggcactgctttcatttaattgggctttaggcactccattcgaatgcagaacctcacctctagttgagaccaagaattggcaaatttgcatgagctcctggaaagagttgctgactttgtatctaagacctgccagggaataccaagagttgtttctacagactttttttttttttttgtatgggagaagatactgtggcaaccaggaaggaatggaaaaaaaattcttttctctacagcaaattaatgtgaggaagctcctccaatcctctggctatttaaggttcaaaatcaagtgcctagggaaaattccaatggatgattttctgggagctatcttgtctaccttgaggttcctgaacaatgaattcccattaatgagcagtcttcagtattaaaaccactgtcttgtcacctcattttgcattactgtcttccgtggatgtttcagttacaactgtaatgttatttatagaacaacattaatccattaaagctaacctatttttcaatatttatgataatctatgtacatatattgtctgtccatatgtatttgtaaataggttgtatataatgtcaggtttgggtcttgggttcaagtgtatatattcctgtaagtttcttaactgcattttgatgaattcacattatgtaactataagaattgtcccaaaagtacctgtacagaaaattgaatattgaaaaattgacaaattgtgtacaaacactaaaaaaaacttgtttaaattgtatttgcaataaacaacatcaaattttttcatgaaatcttggtacaaattcagatctcttatttaaaatttaaataaggaatacattttcaaaatgcagtaatcaaaatgtgatctagtgtaatgaaataaaatgtgatctagtgtaatggaagacctttgagaacctgggtgtattaactttgtgtatatagtgtaaatatccccactgtactgttagaggccaacaattctagtatggcttgttggcaaagagtgctacaccgtttcaatgaaacaatgtatgtttgttttaactgaactaaaataaatacatgcttaatcctg

SEQ ID NO: 20 - protein, 506 aa, Homo sapiens
MKKAEMGRFSISPDEDSSSYSSNSDFNYSYPTKQAALKSHYADVDPENQNFLLESNLGKKKYETEFHPGTTSFGMSVFNLSNAIVGSGILGLSYAMANTGIALFIILLTFVSIFSLYSVHLLLKTANEGGSLLYEQLGYKAFGLVGKLAASGSITMQNIGAMSSYLFIVKYELPLVIQALTNIEDKTGLWYLNGNYLVLLVSLVVILPLSLFRNLGYLGYTSGLSLLCMVFFLIVVICKKFQVPCPVEAALIINETINTTLTQPTALVPALSHNVTENDSCRPHYFIFNSQTVYAVPILIFSFVCHPAVLPIYEELKDRSRRRMMNVSKISFFAMFLMYLLAALFGYLTFYEHVESELLHTYSSILGTDILLLIVRLAVLMAVTLTVPVVIFPIRSSVTHLLCASKDFSWWRHSLITVSILAFTNLLVIFVPTIRDIFGFIGASAASMLIFILPSAFYIKLVKKEPMKSVQKIGALFFLLSGVLVMTGSMALIVLDWVHNAPGGGH

SEQ ID NO: 21 - DNA, 490 bp, Homo sapiens
  CDS (8)..(241)
cgccaccatgccgccctacaccgtggtctatttcccagttcgaggccgctgcgcggccctgcgcatgctgctggcagatcagggccagagatggaaggaggaggtggtgaccgtggagacgtggcaggagggctcactcaaagcctcctgcctatacgggcagctccccaagttcaaggcaagaccttcattgtgggagaccagatctccttcgctgactacaacctgctggacttgctgctgatccatgaggtcctagcccctggctgcctggatgcgttccccctgctctcagcatatgtggggcgcctcagtgcccggcccaagctcaaggccttcctggcctcccctgagtacgtgaacctccccatcaatggcaacgggaaacagtgagggttggggggactctgagcgggaggcagagtttgccttcctttctccaggaccaataaaatttctaagagagctacaaaaaaaaaaaaaaaaaccc

SEQ ID NO: 22 - protein, 78 aa, Homo sapiens [sequence omitted]

SEQ ID NO: 23 - DNA, 625 bp, Homo sapiens
  CDS (3)..(599)
tcatggcctccggtaacatgcacattggaaagctcacccctgacttcaaggccactgccgtggtggatggcacctacagggaggtaaagctgttggactacagagggaagcacgtggtcctctttttccatcctctggacttcacttttttttttcccacagagatcatcgcattcagcgaccatgctgagggcttccgaaagctgcaaagttgcaaagtgctggggacctcggtgggctcacagttcacccacctggcttggatcaacatcccccggaaggagggaggctttgagtccctggacacccctctgcttgctgacgtgaccctgaagttgtctgagaattacggcgtgttgaaaacagacgagggcattgtctgcaggggcctctttatcatccatggcaaggatgtccttccccagatcgctgttaatgattggcctgtgggacactttgtggatgaggccctgcggctggtccaggccttccagtacacagacgagcacccggaaatttgtcctgctggctggaagcctggcagtgacatgatcaagcccagcgtgaatgacagcaaggaatatttctccaaacacaactaggctggctgatggatcatgagctt

SEQ ID NO: 24 - protein, 199 aa, Homo sapiens
MASGNMHIGKLTPDFKATAVVDGTYREVKLLDYRGKHVVLFFHPLDFTFFFPTEIIAFSDHAEGFRKLQSCKVLGTSVGSQFTHLAWINIPRKEGGFESLDTPLLADVTLKLSENYGVLKTDEGIVCRGLFIIHGKDVLPQIAVNDWPVGHFVDEALRLVQAFQYTDEHPEICPAGWKPGSDMIKPSVNDSKEYFSKHN

SEQ ID NO: 25 - DNA, 1081 bp, Homo sapiens
  CDS (7)..(1059)
ctggggatgatgacggatctgaagcaaagccattcagtgaggctgaatgatggacccttcatgccagtgctgggatttggcacttatgctcctgatcatgtaagtggaccccaggaggctgaagtttctcccaaaagccaggctgccgaggccaccaaagtggctattgacgtaggcttccgccatattgattcagcatacttataccaaaatgaggaggaggttggacaggccatttgggagaagatcgctgatggtaccgtcaagagagaggaaatattctacaccatcaagctttgggctactttctttcgggcagaattggttcacccggccctagaaaggtcactgaagaaacttggaccggactatgtagatctcttcattattcatgtaccatttgctatgaagttctttatcttcttttctattttccagcctgggaaagaattactgccaaaggatgccagtggagagattattttagaaactgtggagctttgtgacacttgggaggtacaggccctggagaagtgcaaagaagcaggtttaaccaggtccattggggtgtccaatttcaatcacaagctgctggaactcatcctcaacaagccagggctcaagtacaagcccacctgcaaccaggtgcaggtggaatgtcacccttacctcaaccagagcaaactcctggagttctgcaagtccaaggacattgttctagttgcctacagtgccctgggatcccaaagagacccacagtgggtggatcccgactgcccacatctcttggaggagccgatcttgaaatccattgccaagaaacacagtggaagcccaggccaggtcgccctgcgctaccagctgcagcggggagtggtggtgctggccaagagcttctctcaggagagaatcaaagagaacttccaggtatcctttcagatttttgactttgagttgactccagaggacatgaaagccattgatggcctcaacagaaatctccgatatgacaagttacaattggctaatcacccttattttccattttctgaagaatattgaccatgagctattgaacatt

SEQ ID NO: 26 - protein, 351 aa, Homo sapiens
MMTDLKQSHSVRLNDGPFMPVLGFGTYAPDHVSGPQEAEVSPKSQAAEATKVAIDVGFRHIDSAYLYQNEEEVGQAIWEKIADGTVKREEIFYTIKLWATFFRAELVHPALERSLKKLGPDYVDLFIIHVPFAMKFFIFFSIFQPGKELLPKDASGEIILETVELCDTWEVQALEKCKEAGLTRSIGVSNFNHKLLELILNKPGLKYKPTCNQVQVECHPYLNQSKLLEFCKSKDIVLVAYSALGSQRDPQWVDPDCPHLLEEPILKSIAKKHSGSPGQVALRYQLQRGVVVLAKSFSQERIKENFQVSFQIFDFELTPEDMKAIDGLNRNLRYDKLQLANHPYFPFSEEY

SEQ ID NO: 27 - DNA, 698 bp, Homo sapiens
  CDS (13)..(684)
aaaaaaatctgcatgagcatgtatccacccattaatggccttgactgggccaatatttttgtcgtcggcggatctgcatggggtgggtgttccacgctgttaatgaatgaactcgaaagggtttcgttcgacctggcgtgtaatttgctgatttgggtgggagaccttgttgcccgcggcgcgaaaaacgtcgagtgcctgaacttgattactatgccttggttccgggctgtgcgaggtaaccatgagcagatgatgattgatgggctatcggagtatggaaacgttaaccactggctggaaaacggcggcgtgtggttcttcagtcttgattatgaaaaagaggtgctggctaaggctctggttcataaatcggccagcctgccattcgtcatcgagctggttaccgctgaacgtaaaatcgttatctgccacgctgactacccgcataacgaatatgcgttcgacaagccggtcccgaaagacatggtcatctggaatcgtgaacgggttagcgacgctcaggacggcattgtctcgccgatagctggtgctgatctgtttatcttcggccacacccctgcgcgccagcccctgaagtatgccaaccagatgtacatcgatactggtgccgtgttctgcggaaacctcacgctggtacaggttcaaggtggtgcccatgcgtaaaccatcccgcc

SEQ ID NO: 28 - protein, 224 aa, Homo sapiens
MSMYPPINGLDWANIFVVGGSAWGGCSTLLMNELERVSFDLACNLLIWVGDLVARGAKNVECLNLITMPWFRAVRGNHEQMMIDGLSEYGNVNHWLENGGVWFFSLDYEKEVLAKALVHKSASLPFVIELVTAERKIVICHADYPHNEYAFDKPVPKDMVIWNRERVSDAQDGIVSPIAGADLFIFGHTPARQPLKYANQMYIDTGAVFCGNLTLVQVQGGAHA

SEQ ID NO: 29 - DNA, 540 bp, Homo sapiens
  CDS (173)..(427)
ccagacatgggactggaggacgagcaaaagatgcttaccgaatccggagatcctgaggaggaggaagaggaagaggaggaattagtgataggactgaggctttcagtgcatactggcaaccttggaaggcaggaatgtgaaacttttccctactacttagcatcagaattgaatgggagaccgcattctgccatttctggcggcagtgtggctctgccagctggccttctgcacggatcccctaacaacagtgagagagcaatgcgagcagttggagaaatgtgtaaaggcccgggagcggctagagctctgtgatgagcgtgtatcctctcgatcacatacagaagaggattgcacggaggagctctttgacttcttgcatgcgagggaccattgcgtggcccacaaactctttaacaacttgaaataaatgtgtggacttaattcaccccagtcttcatcatctgggcatcagaatatttccttatggttttggatgtaccatttgtctcttatctgtgtaactgtaagtcacatgaa

SEQ ID NO: 30 - protein, 85 aa, Homo sapiens
MGDRILPFLAAVWLCQLAFCTDPLTTVREQCEQLEKCVKARERLELCDERVSSRSHTEEDCTEELFDFLHARDHCVAHKLFNNLK

SEQ ID NO: 31 - DNA, 3057 bp, Homo sapiens
  CDS (16)..(2907)
cgcgcagctgcccccatggctttgcggggcgccgcgggagcgaccgacaccccggtgtcctcggccgggggagcccccggcggctcagcgtcctcgtcgtccacctcctcgggcggctcggcctcggcgggcgcggggctgtgggccgcgctctatgactacgaggctcgcggcgaggacgagctgagcctgcggcgcggccagctggtggaggtgctgtcgcaggacgccgccgtgtcgggcgacgagggctggtgggcaggccaggtgcagcggcgcctcggcatcttccccgccaactacgtggctccctgccgcccggccgccagccccgcgccgccgccctcgcggcccagctccccggtacacgtcgccttcgagcggctggagctgaaggagctcatcggcgctgggggcttcgggcaggtgtaccgcgccacctggcagggccaggaggtggccgtgaaggcggcgcgccaggacccggagcaggacgcggcggcggctgccgagagcgtgcggcgcgaggctcggctcttcgccatgctgcggcaccccaacatcatcgagctgcgcggcgtgtgcctgcagcagccgcacctctgcctggtgctggagttcgcccgcggcggagcgctcaaccgagcgctggccgctgccaacgccgccccggacccgcgcgcgcccggcccccgccgcgcgcgccgcatccctccgcacgtgctggtcaactgggccgtgcagatagcgcggggcatgctctacctgcatgaggaggccttcgtgcccatcctgcaccgggacctcaagtccagcaacattttgctacttgagaagatagaacatgatgacatctgcaataaaactttgaagattacagattttgggttggcgagggaatggcacaggaccaccaaaatgagcacagcaggcacctatgcctggatggcccccgaagtgatcaagtcttccttgttttctaagggaagcgacatctggagctatggagtgctgctgtgggaactgctcaccggagaagtcccctatcggggcattgatggcctcgccgtggcttatggggtagcagtcaataaactcactttgcccattccatccacctgccctgagccgtttgccaagctcatgaaagaatgctggcaacaagaccctcatattcgtccatcgtttgccttaattctcgaacagttgactgctattgaaggggcagtgatgactgagatgcctcaagaatcttttcattccatgcaagatgactggaaactagaaattcaacaaatgtttgatgagttgagaacaaaggaaaaggagctgcgatcccgggaagaggagctgactcgggcggctctgcagcagaagtctcaggaggagctgctaaagcggcgtgagcagcagctggcagagcgcgagatcgacgtgctggagcgggaacttaacattctgatattccagctaaaccaggagaagcccaaggtaaagaagaggaagggcaagtttaagagaagtcgtttaaagctcaaagatggacatcgaatcagtttaccaacagatttccagcacaagataaccgtgcaggcctctcccaacttggacaaacggcggagcctgaacagcagcagttccagtcccccgagcagccccacaatgatgccccgactccgagccatacagtgtgagcttgatgaaagcaataaaacttggggaaggaacacagtctttcgacaagaagaatttgaggatgtaaaaaggaattttaagaaaaaaggttgtacctggggaccaaattccattcaaatgaaagatcctagtcaggcctacattgatctacctcttgggaaagatgctcagagagagaatcctgcagaagctgaaagctgggaggaggcagcctctgcgaatgctgccacagtctccattgagatgactcctacgaatagtctgagtagatccccccagagaaagaaaacggagtcagctctgtatgggtgcaccgtccttctggcatcggtggctctgggactggacctcagagagcttcataaagcacaggctgctgaagaaccgttgcccaaggaagagaagaagaaacgagagggaatcttccagcgggcttccaagtcccgcagaagcgccagtcctcccacaagcctgccatccacctgtggggaggccagcagcccaccctccctgccactgtcaagtgccctgggcatcctctccacaccttctttctccacaaagtgcctgctgcagatggacagtgaagatccactggtggacagtgcacctgtcacttgtgactctgagatgctcactccggatttttgtcccactgccccaggaagtggtcgtgagccagccctcatgccaagacttgacactgattgtagtgtatcaagaaacttgccgtcttccttcctacagcagacatgtgggaatgtaccttactgtgcttcttcaaaacatagaccgtcacatcacagacggaccatgtctgatggaaatccgaccccaagtaggttgctgccactctgcccctcacctgctcctcacagtcatctgccaagggaggtctcacccaagaagcacagcactgtccacatcgtgcctcagcgtcgccctgcctccctgagaagccgctcagatctgcctcaggcttacccacagacagcagtgtctcagctggcacagactgcctgtgtagtgggtcgcccaggaccacatcccacccaattcctcgctgccaaggagagaactaaatcccatgtgccttcattactggatgctgacgtggaaggtcagagcagggactacactgtgccactgtgcagaatgaggagcaaaaccagccggccatctatatatgaactggagaaagaattcctgtcttaaactaagtgccttactgttgtttaagcatttttttaaggtgaacaaatgaacacaatgtatctacctttgaactgtttcatgctgctgtgttttcaaaagctgtggccatgttcctaaattagtaagatatatccagcttctcaaaaa

SEQ ID NO: 32 - protein, 964 aa, Homo sapiens
MALRGAAGATDTPVSSAGGAPGGSASSSSTSSGGSASAGAGLWAALYDYEARGEDELSLRRGQLVEVLSQDAAVSGDEGWWAGQVQRRLGIFPANYVAPCRPAASPAPPPSRPSSPVHVAFERLELKELIGAGGFGQVYRATWQGQEVAVKAARQDPEQDAAAAAESVRREARLFAMLRHPNIIELRGVCLQQPHLCLVLEFARGGALNRALAAANAAPDPRAPGPRRARRIPPHVLVNWAVQIARGMLYLHEEAFVPILHRDLKSSNILLLEKIEHDDICNKTLKITDFGLAREWHRTTKMSTAGTYAWMAPEVIKSSLFSKGSDIWSYGVLLWELLTGEVPYRGIDGLAVAYGVAVNKLTLPIPSTCPEPFAKLMKECWQQDPHIRPSFALILEQLTAIEGAVMTEMPQESFHSMQDDWKLEIQQMFDELRTKEKELRSREEELTRAALQQKSQEELLKRREQQLAEREIDVLERELNILIFQLNQEKPKVKKRKGKFKRSRLKLKDGHRISLPTDFQHKITVQASPNLDKRRSLNSSSSSPPSSPTMMPRLRAIQCELDESNKTWGRNTVFRQEEFEDVKRNFKKKGCTWGPNSIQMKDPSQAYIDLPLGKDAQRENPAEAESWEEAASANAATVSIEMTPTNSLSRSPQRKKTESALYGCTVLLASVALGLDLRELHKAQAAEEPLPKEEKKKREGIFQRASKSRRSASPPTSLPSTCGEASSPPSLPLSSALGILSTPSFSTKCLLQMDSEDPLVDSAPVTCDSEMLTPDFCPTAPGSGREPALMPRLDTDCSVSRNLPSSFLQQTCGNVPYCASSKHRPSHHRRTMSDGNPTPSRLLPLCPSPAPHSHLPREVSPKKHSTVHIVPQRRPASLRSRSDLPQAYPQTAVSQLAQTACVVGRPGPHPTQFLAAKERTKSHVPSLLDADVEGQSRDYTVPLCRMRSKTSRPSIYELEKEFLS

SEQ ID NO: 33 - DNA, 9930 bp, Homo sapiens
  CDS (61)..(9618)
ccgcgggtgcccccgtggccgcccagttccggcgtccccccagcccagctctcagtggccatgcagaaagcccggggcacgcgaggcgaggatgcgggcacgagggcaccccccagccccggagtgcccccgaaaagggccaaggtgggggccggcggcggggctcctgtggccgtggccggggcgccagtcttcctgcggcccctgaagaacgcggcggtgtgcgcgggcagcgacgtgcggctgcgggtggtggtgagcgggacgccccatcccatcctccgctggttccgggatgggcagctcctgcccgcgccggcccccgagcccagctgcctgtggctgcggcgctgcggggcgcaggacgccggcgtgtacagctgcatggcccagaacgagcggggccgggcctcctgcgaggcggtgctcacagtgctggaggtcggagactcagagacggctgaggatgacatcagcgatgtgcagggaacccagcgcctggagcttcgggatgacggggccttcagcacccccacggggggttctgacaccctggtgggcacctccctggacacacccccgacctccgtgacaggcacctcagaggagcaagtgagctggtggggcagcgggcagacggtcctggagcaggaagcgggcagtgggggtggcacccgccgcctcccgggcagcccaaggcaagcacaggcaaccggggccgggccacggcacctgggggtggagccgctggtgcgggcatctcgagctaatctggtgggcgcaagctgggggtcagaggatagcctttccgtggccagtgacctgtacggcagcgcattcagcctgtacagaggacgggcgctctctatccacgtcagcgtccctcagagcgggttgcgcagggaggagcccgaccttcagcctcaactggccagcgaagccccacgccgccctgcccagccgcctccttccaaatccgcgctgctccccccaccgtcccctcgggtcgggaagcggtccccgccgggacccccggcccagcccgcggccacccccacgtcgccccaccgtcgcactcaggagcctgtgctgcccgaggacaccaccaccgaagagaagcgagggaagaagtccaagtcgtccgggccctccctggcgggcaccgcggaatcccgaccccagacgccactgagcgaggcctcaggccgcctgtcggcgttgggccgatcgcctaggctggtgcgcgccggctcccgcatcctggacaagctgcagttcttcgaggagcgacggcgcagcctggagcgcagcgactcgccgccggcgcccctgcggccctgggtgcccctgcgcaaggcccgctctctggagcagcccaagtcggagcgcggcgcaccgtggggcacccccggggcctcgcaggaagaactgcgggcgccaggcagcgtggccgagcggcgccgcctgttccagcagaaagcggcctcgctggacgagcgcacgcgtcagcgcagcccggcctcagacctcgagctgcgcttcgcccaggagctgggccgcatccgccgctccacgtcgcgggaggagctggtgcgctcgcacgagtccctgcgcgccacgctgcagcgtgccccatcccctcgagagcccggcgagcccccgctcttctctcggccctccacccccaagacatcgcgggccgtgagccccgccgccgcccagccgccctctccgagcagcgcggagaagccgggggacgagcctgggaggcccaggagccgcgggccggcgggcaggacagagccgggggaaggcccgcagcaggaggttaggcgtcgggaccaattcccgctgacccggagcagagccatccaggagtgcaggagccctgtgccgccccccgccgccgatcccccagaggccaggacgaaagcaccccccggtcggaagcgggagcccccggcgcaggccgtgcgcttcctgccctgggccacgccgggcctggagggcgctgctgtaccccagaccttggagaagaacagggcggggcctgaggcagagaagaggcttcgcagagggccggaggaggacggtccctgggggccctgggaccgccgaggggcccgcagccagggcaaaggtcgccgggcccggcccacctcccctgagctcgagtcttcggatgactcctacgtgtccgctggagaagagcccctagaggcccctgtgtttgagatccccctgcagaatgtggtggtggcaccaggggcagatgtgctgctcaagtgtatcatcactgccaaccccccgccccaagtgtcctggcacaaggatgggtcagcgctgcgcagcgagggccgcctcctcctccgggctgagggtgagcggcacaccctgctgctcagggaggccagggcagcagatgccgggagctatatggccaccgccaccaacgagctgggccaggccacctgtgccgcctcactgaccgtgagacccggtgggtctacatcccctttcagcagccccatcacctccgacgaggaatacctgagccccccagaggagttcccagagcctggggagacctggccgcgaacccccaccatgaagcccagtcccagccagaaccgccgttcttctgacactggctccaaggcaccccccaccttcaaggtctcacttatggaccagtcagtaagagaaggccaagatgtcatcatgagcatccgcgtgcagggggagcccaagcctgtggtctcctggctgagaaaccgccagcccgtgcgcccagaccagcggcgctttgcggaggaggctgagggtgggctgtgccggctgcggatcctggctgcagagcgtggcgatgctggtttctacacttgcaaagcggtcaatgagtatggtgctcggcagtgcgaggcccgcttgaggtccgaggacgtggacgtgggggccggggagatggcgctgtttgagtgcctggtggcggggcccactgacgtggaggtggattggctgtgccgtggccgcctgctgcagcctgcactgctcaaatgcaagatgcatttcgatggccgcaaatgcaagctgctacttacatctgtacatgaggacgacagtggcgtctacacctgcaagctcagcacggccaaagatgagctgacctgcagtgcccggctgaccgtgcggccctcgttggcacccctgttcacacggctgctggaagatgtggaggtgttggagggccgagctgcccgtttcgactgcaagatcagtggcaccccgccccctgttgttacctggactcattttggctgccccatggaggagagtgagaacttgcggctgcggcaggacgggggtctgcactcactgcacattgcccatgtgggcagcgaggacgaggggctctatgcggtcagtgctgttaacacccatggccaggcccactgctcagcccagctgtatgtagaagagccccggacagccgcctcaggccccagctcgaagctggagaagatgccatccattcccgaggagccagagcagggtgagctggagcggctgtccattcctgacttcctgcggccactgcaggacctggaggtgggactggccaaggaggccatgctagagtgccaggtgaccggcctgccctaccccaccatcagctggttccacaatggccaccgcatccagagcagcgacgaccggcgcatgacacagtacagggatgtccatcgcttggtgttccctgccgtggggcctcagcacgccggtgtctacaagagcgtcattgccaacaagctgggcaaagctgcctgctatgcccacctgtatgtcacagatgtggtcccaggccctccagatggcgccccgcaggtggtggctgtgacggggaggatggtcacactcacatggaacccccccaggagtctggacatggccatcgacccggactccctgacgtacacagtgcagcaccaggtgctgggctcggaccagtggacggcactggtcacaggcctgcgggagccagggtgggcagccacagggctgcgtaagggggtccagcacatcttccgggtcctcagcaccactgtcaagagcagcagcaagccctcacccccttctgagcctgtgcagctgctggagcacggcccaaccctggaggaggcccctgccatgctggacaaaccagacatcgtgtatgtggtggagggacagcctgccagcgtcaccgtcacattcaaccatgtggaggcccaggtcgtctggaggagctgccgaggggccctcctagaggcacgggccggtgtgtacgagctgagccagccagatgatgaccagtactgtcttcggatctgccgggtgagccgccgggacatgggggccctcacctgcaccgcccgaaaccgtcacggcacacagacctgctcggtcacattggagctggcagaggcccctcggtttgagtccatcatggaggacgtggaggtgggggctggggaaactgctcgctttgcggtggtggtcgagggaaaaccactgccggacatcatgtggtacaaggacgaggtgctgctgaccgagagcagccatgtgagcttcgtgtacgaggagaatgagtgctccctggtggtgctcagcacgggggcccaggatggaggcgtctacacctgcaccgcccagaacctggcgggtgaggtctcctgcaaagcagagttggctgtgcattcagctcagacagctatggaggtcgagggggtcggggaggatgaggaccatcgaggaaggagactcagcgacttttatgacatccaccaggagatcggcaggggtgctttctcctacttgcggcgcatagtggagcgtagctccggcctggagtttgcggccaagttcatccccagccaggccaagccaaaggcatcagcgcgtcgggaggcccggctgctggccaggctccagcacgactgtgtcctctacttccatgaggccttcgagaggcgccggggactggtcattgtcaccgagctctgcacagaggagctgctggagcgaatcgccaggaaacccaccgtgtgtgagtctgagatccgggcctatatgcggcaggtgctagagggaatacactacctgcaccagagccacgtgctgcacctcgatgtcaagcctgagaacctgctggtgtgggatggtgctgcgggcgagcagcaggtgcggatctgtgactttgggaatgcccaggagctgactccaggagagccccagtactgccagtatggcacacctgagtttgtagcacccgagattgtcaatcagagccccgtgtctggagtcactgacatctggcctgtgggtgttgttgccttcctgctgtctgacaggaatctccccgtttgttggggaaatgaccggacaacattgatgaacatccgaaactacaacgtggccttcgaggagaccacattcctgagcctgagcagggaggcccggggcttcctcatcaaagtgttggtgcaggaccggctgagacctaccgcagaagagaccctagaacatccttggttcaaaactcaggcaaagggcgcagaggtgagcacggatcacctgaagctattcctctcccggcggaggtggcagcgctcccagatcagctacaaatgccacctggtgctgcgccccatccccgagctgctgcgggcccccccagagcgggtgtgggtgaccatgcccagaaggccaccccccagtggggggctctcatcctcctcggattctgaagaggaagagctggaagagctgccctcagtgccccgcccactgcagcccgagttctctggctcccgggtgtccctcacagacattcccactgaggatgaggccctggggaccccagagactggggctgccacccccatggactggcaggagcagggaagggctccctctcaggaccaggaggctcccagcccagaggccctcccctccccaggccaggagcccgcagctggggctagccccaggcggggagagctccgcaggggcagctcggctgagagcgccctgccccgggccgggccgcgggagctgggccggggcctgcacaaggcggcgtctgtggagctgccgcagcgccggagccccggcccgggagccacccgcctggcccggggaggcctgggtgagggcgagtatgcccagaggctgcaggccctgcgccagcggctgctgcggggaggccccgaggatggcaaggtcagcggcctcaggggtcccctgctggagagcctggggggccgtgctcgggacccccggatggcacgagctgcctccagcgaggcagcgccccaccaccagcccccactcgagaaccggggcctgcaaaagagcagcagcttctcccagggtgaggcggagccccggggccggcaccgccgagcgggggcgcccctcgagatccccgtggccaggcttggggcccgtaggctacaggagtctccttccctgtctgccctcagcgaggcccagccatccagccctgcacggcccagcgcccccaaacccagtacccctaagtctgcagaaccttctgccaccacacctagtgatgctccgcagccccccgcaccccagcctgcccaagacaaggctccagagcccaggccagaaccagtccgagcctccaagcctgcaccacccccccaggccctgcaaaccctagcgctgcccctcacaccctatgctcagatcattcagtccctccagctgtcaggccacgcccagggcccctcgcagggccctgccgcgccgccttcagagcccaagccccacgctgctgtctttgccagggtggcctccccacctccgggagcccccgagaagcgcgtgccctcagccgggggtcccccggtgctagccgagaaagcccgagttcccacggtgccccccaggccaggcagcagtctcagtagcagcatcgaaaacttggagtcggaggccgtgttcgaggccaagttcaagcgcagccgcgagtcgcccctgtcgctggggctgcggctgctgagccgttcgcgctcggaggagcgcggccccttccgtggggccgaggaggaggatggcatataccggcccagcccggcggggaccccgctggagctggtgcgacggcctgagcgctcacgctcggtgcaggacctcagggctgtcggagagcctggcctcgtccgccgcctctcgctgtcactgtcccagcggctgcggcggacccctcccgcgcagcgccacccggcctgggaggcccgcggcggggacggagagagctcggagggcgggagctcggcgcggggctccccggtgctggcgatgcgcaggcggctgagcttcaccctggagcggctgtccagccgattgcagcgcagtggcagcagcgaggactcggggggcgcgtcgggccgcagcacgccgctgttcggacggcttcgcagggccacgtccgagggcgagagtctgcggcgccttggccttccgcacaaccagttggccgcccaggccggcgccaccacgccttccgccgagtccctgggctccgaggccagcgccacgtcgggctcctcagccccaggggaaagccgaagccggctccgctggggcttctctcggccgcggaaggacaaggggttatcgccaccaaacctctctgccagcgtccaggaggagttgggtcaccagtacgtgcgcagtgagtcagacttccccccagtcttccacatcaaactcaaggaccaggtgctgctggagggggaggcagccaccctgctctgcctgccagcggcctgccctgcaccgcacatctcctggatgaaagacaagaagtccttgaggtcagagccctcagtgatcatcgtgtcctgcaaagatgggcggcagctgctcagcatcccccgggcgggcaagcggcacgccggtctctatgagtgctcggccaccaacgtactgggcagcatcaccagctcctgtaccgtggctgtggcccgagtcccaggaaagctagctcctccagaggtaccccagacctaccaggacacggcgctggtgctgtggaagccgggagacagccgggcaccttgcacgtatacgctggagcggcgagtggatggggagtctgtgtggcaccctgtgagctcaggcatccccgactgttactacaacgtgacccacctgccagttggcgtgactgtgaggttccgtgtggcctgtgccaaccgtgctgggcaggggcccttcagcaactcttctgagaaggtctttgtcaggggtactcaagattcttcagctgtgccatctgctgcccaccaagaggcccctgtcacctcaaggtcagtcagggcccggcctcctgactctcctacctcactggcctcacccctagctcctgctgcccccacacccccgtcagtcactgtcagcccctcatctccccccacacctcctagccaggccttgtcctcgctcaaggctgtgggtccaccaccccaaacccctccacgaagacacaggggcctgcaggctgcccggccagcggagcccaccctacccagtacccacgtcaccccaagtgagccccagcctttcgtccttgacactgggaccccgatcccagcctccactcctcaaggggttaaaccagtgtcttcctctactcctgtgtatgtggtgacttcctttgtgtctgcaccaccagcccctgagcccccagcccctgagccccctcctgagcctaccaaggtgactgtgcagagcctcagcccggccaaggaggtggtcagctcccctgggagcagtccccgaagctctcccaggcctgagggtaccactcttcgacagggtccccctcagaaaccctacaccttcctggaggagaaagccaggggccgctttggtgttgtgcgagcgtgccgggagaatgccacggggcgaacgttcgtggccaagatcgtgccctatgctgccgagggcaagccgcgggtcctgcaggagtacgaggtgctgcggaccctgcaccacgagcggatcgtgtccctgcacgaggcctacatcacccctcggtacctcgtgctcattgctgagagctgtggcaaccgggaactcctctgtgggctcagtgacaggttccggtattctgaggatgacgtggccacttacatggtgcagctgctacaaggcctggactacctccacggccaccacgtgctccacctagacatcaagccagacaacctgctgctggcccctgacaatgccctcaagattgtggactttggcagtgcccagccctacaacccccaggcccttaggccccttggccaccgcacggtgcacctgacactaatgtccttctgggtctgggtgttggcctccggtctgcatatgtcaatcaagctatcttccccaacaggctcagtggacgctccccgttctatgagccagacccccaggaaacggaggctcggattgtggggggccgctttgatgccttccagctgtaccccaatacatcccagagcgccaccctcttcttgcgaaaggttctctctgtacatccctggtgagtgagccccacacctgctatcccccagtgttacctgcccctggcctggcctgtgccagagatctcccagctcctcccctgctcctaggaagaagtctgctgcttctactaaatggtcatactacccaccatttaaagcctgaggcagccccgtgcaaggcagactcactgtccccattccggcgactggggaactgagctcttgagctgcccaagatcacacatgtaggggtgggatccaggactgggacatgggtctgcgggaggacagagccccggcagctcccagagcttccttccaggttcatcatccc

SEQ ID NO: 34 - protein, 3186 aa, Homo sapiens
MQKARGTRGEDAGTRAPPSPGVPPKRAKVGAGGGAPVAVAGAPVFLRPLKNAAVCAGSDVRLRVVVSGTPHPILRWFRDGQLLPAPAPEPSCLWLRRCGAQDAGVYSCMAQNERGRASCEAVLTVLEVGDSETAEDDISDVQGTQRLELRDDGAFSTPTGGSDTLVGTSLDTPPTSVTGTSEEQVSWWGSGQTVLEQEAGSGGGTRRLPGSPRQAQATGAGPRHLGVEPLVRASRANLVGASWGSEDSLSVASDLYGSAFSLYRGRALSIHVSVPQSGLRREEPDLQPQLASEAPRRPAQPPPSKSALLPPPSPRVGKRSPPGPPAQPAATPTSPHRRTQEPVLPEDTTTEEKRGKKSKSSGPSLAGTAESRPQTPLSEASGRLSALGRSPRLVRAGSRILDKLQFFEERRRSLERSDSPPAPLRPWVPLRKARSLEQPKSERGAPWGTPGASQEELRAPGSVAERRRLFQQKAASLDERTRQRSPASDLELRFAQELGRIRRSTSREELVRSHESLRATLQRAPSPREPGEPPLFSRPSTPKTSRAVSPAAAQPPSPSSAEKPGDEPGRPRSRGPAGRTEPGEGPQQEVRRRDQFPLTRSRAIQECRSPVPPPAADPPEARTKAPPGRKREPPAQAVRFLPWATPGLEGAAVPQTLEKNRAGPEAEKRLRRGPEEDGPWGPWDRRGARSQGKGRRARPTSPELESSDDSYVSAGEEPLEAPVFEIPLQNVVVAPGADVLLKCIITANPPPQVSWHKDGSALRSEGRLLLRAEGERHTLLLREARAADAGSYMATATNELGQATCAASLTVRPGGSTSPFSSPITSDEEYLSPPEEFPEPGETWPRTPTMKPSPSQNRRSSDTGSKAPPTFKVSLMDQSVREGQDVIMSIRVQGEPKPVVSWLRNRQPVRPDQRRFAEEAEGGLCRLRILAAERGDAGFYTCKAVNEYGARQCEARLRSEDVDVGAGEMALFECLVAGPTDVEVDWLCRGRLLQPALLKCKMHFDGRKCKLLLTSVHEDDSGVYTCKLSTAKDELTCSARLTVRPSLAPLFTRLLEDVEVLEGRAARFDCKISGTPPPVVTWTHFGCPMEESENLRLRQDGGLHSLHIAHVGSEDEGLYAVSAVNTHGQAHCSAQLYVEEPRTAASGPSSKLEKMPSIPEEPEQGELERLSIPDFLRPLQDLEVGLAKEAMLECQVTGLPYPTISWFHNGHRIQSSDDRRMTQYRDVHRLVFPAVGPQHAGVYKSVIANKLGKAACYAHLYVTDVVPGPPDGAPQVVAVTGRMVTLTWNPPRSLDMAIDPDSLTYTVQHQVLGSDQWTALVTGLREPGWAATGLRKGVQHIFRVLSTTVKSSSKPSPPSEPVQLLEHGPTLEEAPAMLDKPDIVYVVEGQPASVTVTFNHVEAQVVWRSCRGALLEARAGVYELSQPDDDQYCLRICRVSRRDMGALTCTARNRHGTQTCSVTLELAEAPRFESIMEDVEVGAGETARFAVVVEGKPLPDIMWYKDEVLLTESSHVSFVYEENECSLVVLSTGAQDGGVYTCTAQNLAGEVSCKAELAVHSAQTAMEVEGVGEDEDHRGRRLSDFYDIHQEIGRGAFSYLRRIVERSSGLEFAAKFIPSQAKPKASARREARLLARLQHDCVLYFHEAFERRRGLVIVTELCTEELLERIARKPTVCESEIRAYMRQVLEGIHYLHQSHVLHLDVKPENLLVWDGAAGEQQVRICDFGNAQELTPGEPQYCQYGTPEFVAPEIVNQSPVSGVTDIWPVGVVAFLLSDRNLPVCWGNDRTTLMNIRNYNVAFEETTFLSLSREARGFLIKVLVQDRLRPTAEETLEHPWFKTQAKGAEVSTDHLKLFLSRRRWQRSQISYKCHLVLRPIPELLRAPPERVWVTMPRRPPPSGGLSSSSDSEEEELEELPSVPRPLQPEFSGSRVSLTDIPTEDEALGTPETGAATPMDWQEQGRAPSQDQEAPSPEALPSPGQEPAAGASPRRGELRRGSSAESALPRAGPRELGRGLHKAASVELPQRRSPGPGATRLARGGLGEGEYAQRLQALRQRLLRGGPEDGKVSGLRGPLLESLGGRARDPRMARAASSEAAPHHQPPLENRGLQKSSSFSQGEAEPRGRHRRAGAPLEIPVARLGARRLQESPSLSALSEAQPSSPARPSAPKPSTPKSAEPSATTPSDAPQPPAPQPAQDKAPEPRPEPVRASKPAPPPQALQTLALPLTPYAQIIQSLQLSGHAQGPSQGPAAPPSEPKPHAAVFARVASPPPGAPEKRVPSAGGPPVLAEKARVPTVPPRPGSSLSSSIENLESEAVFEAKFKRSRESPLSLGLRLLSRSRSEERGPFRGAEEEDGIYRPSPAGTPLELVRRPERSRSVQDLRAVGEPGLVRRLSLSLSQRLRRTPPAQRHPAWEARGGDGESSEGGSSARGSPVLAMRRRLSFTLERLSSRLQRSGSSEDSGGASGRSTPLFGRLRRATSEGESLRRLGLPHNQLAAQAGATTPSAESLGSEASATSGSSAPGESRSRLRWGFSRPRKDKGLSPPNLSASVQEELGHQYVRSESDFPPVFHIKLKDQVLLEGEAATLLCLPAACPAPHISWMKDKKSLRSEPSVIIVSCKDGRQLLSIPRAGKRHAGLYECSATNVLGSITSSCTVAVARVPGKLAPPEVPQTYQDTALVLWKPGDSRAPCTYTLERRVDGESVWHPVSSGIPDCYYNVTHLPVGVTVRFRVACANRAGQGPFSNSSEKVFVRGTQDSSAVPSAAHQEAPVTSRSVRARPPDSPTSLASPLAPAAPTPPSVTVSPSSPPTPPSQALSSLKAVGPPPQTPPRRHRGLQAARPAEPTLPSTHVTPSEPQPFVLDTGTPIPASTPQGVKPVSSSTPVYVVTSFVSAPPAPEPPAPEPPPEPTKVTVQSLSPAKEVVSSPGSSPRSSPRPEGTTLRQGPPQKPYTFLEEKARGRFGVVRACRENATGRTFVAKIVPYAAEGKPRVLQEYEVLRTLHHERIVSLHEAYITPRYLVLIAESCGNRELLCGLSDRFRYSEDDVATYMVQLLQGLDYLHGHHVLHLDIKPDNLLLAPDNALKIVDFGSAQPYNPQALRPLGHRTVHLTLMSFWVWVLASGLHMSIKLSSPTGSVDAPRSMSQTPRKRRLGLWGAALMPSSCTPIHPRAPPSSCERFSLYIPGE

SEQ ID NO: 35 - DNA, 10122 bp, Homo sapiens
  CDS (61)..(9816)
ccgcgggtgcccccgtggccgcccagttccggcgtccccccagcccagctctcagtggccatgcagaaagcccggggcacgcgaggcgaggatgcgggcacgagggcaccccccagccccggagtgcccccgaaaagggccaaggtgggggccggcggcggggctcctgtggccgtggccggggcgccagtcttcctgcggcccctgaagaacgcggcggtgtgcgcgggcagcgacgtgcggctgcgggtggtggtgagcgggacgccccatcccatcctccgctggttccgggatgggcagctcctgcccgcgccggcccccgagcccagctgcctgtggctgcggcgctgcggggcgcaggacgccggcgtgtacagctgcatggcccagaacgagcggggccgggcctcctgcgaggcggtgctcacagtgctggaggtcggagactcagagacggctgaggatgacatcagcgatgtgcagggaacccagcgcctggagcttcgggatgacggggccttcagcacccccacggggggttctgacaccctggtgggcacctccctggacacacccccgacctccgtgacaggcacctcagaggagcaagtgagctggtggggcagcgggcagacggtcctggagcaggaagcgggcagtgggggtggcacccgccgcctcccgggcagcccaaggcaagcacaggcaaccggggccgggccacggcacctgggggtggagccgctggtgcgggcatctcgagctaatctggtgggcgcaagctgggggtcagaggatagcctttccgtggccagtgacctgtacggcagcgcattcagcctgtacagaggacgggcgctctctatccacgtcagcgtccctcagagcgggttgcgcagggaggagcccgaccttcagcctcaactggccagcgaagccccacgccgccctgcccagccgcctccttccaaatccgcgctgctccccccaccgtcccctcgggtcgggaagcggtccccgccgggacccccggcccagcccgcggccacccccacgtcgccccaccgtcgcactcaggagcctgtgctgcccgaggacaccaccaccgaagagaagcgagggaagaagtccaagtcgtccgggccctccctggcgggcaccgcggaatcccgaccccagacgccactgagcgaggcctcaggccgcctgtcggcgttgggccgatcgcctaggctggtgcgcgccggctcccgcatcctggacaagctgcagttcttcgaggagcgacggcgcagcctggagcgcagcgactcgccgccggcgcccctgcggccctgggtgcccctgcgcaaggcccgctctctggagcagcccaagtcggagcgcggcgcaccgtggggcacccccggggcctcgcaggaagaactgcgggcgccaggcagcgtggccgagcggcgccgcctgttccagcagaaagcggcctcgctggacgagcgcacgcgtcagcgcagcccggcctcagacctcgagctgcgcttcgcccaggagctgggccgcatccgccgctccacgtcgcgggaggagctggtgcgctcgcacgagtccctgcgcgccacgctgcagcgtgccccatcccctcgagagcccggcgagcccccgctcttctctcggccctccacccccaagacatcgcgggccgtgagccccgccgccgcccagccgccctctccgagcagcgcggagaagccgggggacgagcctgggaggcccaggagccgcgggccggcgggcaggacagagccgggggaaggcccgcagcaggaggttaggcgtcgggaccaattcccgctgacccggagcagagccatccaggagtgcaggagccctgtgccgccccccgccgccgatcccccagaggccaggacgaaagcaccccccggtcggaagcgggagcccccggcgcaggccgtgcgcttcctgccctgggccacgccgggcctggagggcgctgctgtaccccagaccttggagaagaacagggcggggcctgaggcagagaagaggcttcgcagagggccggaggaggacggtccctgggggccctgggaccgccgaggggcccgcagccagggcaaaggtcgccgggcccggcccacctcccctgagctcgagtcttcggatgactcctacgtgtccgctggagaagagcccctagaggcccctgtgtttgagatccccctgcagaatgtggtggtggcaccaggggcagatgtgctgctcaagtgtatcatcactgccaaccccccgccccaagtgtcctggcacaaggatgggtcagcgctgcgcagcgagggccgcctcctcctccgggctgagggtgagcggcacaccctgctgctcagggaggccagggcagcagatgccgggagctatatggccaccgccaccaacgagctgggccaggccacctgtgccgcctcactgaccgtgagacccggtgggtctacatcccctttcagcagccccatcacctccgacgaggaatacctgagccccccagaggagttcccagagcctggggagacctggccgcgaacccccaccatgaagcccagtcccagccagaaccgccgttcttctgacactggctccaaggcaccccccaccttcaaggtctcacttatggaccagtcagtaagagaaggccaagatgtcatcatgagcatccgcgtgcagggggagcccaagcctgtggtctcctggctgagaaaccgccagcccgtgcgcccagaccagcggcgctttgcggaggaggctgagggtgggctgtgccggctgcggatcctggctgcagagcgtggcgatgctggtttctacacttgcaaagcggtcaatgagtatggtgctcggcagtgcgaggcccgcttgaggtccgaggacgtggacgtgggggccggggagatggcgctgtttgagtgcctggtggcggggcccactgacgtggaggtggattggctgtgccgtggccgcctgctgcagcctgcactgctcaaatgcaagatgcatttcgatggccgcaaatgcaagctgctacttacatctgtacatgaggacgacagtggcgtctacacctgcaagctcagcacggccaaagatgagctgacctgcagtgcccggctgaccgtgcggccctcgttggcacccctgttcacacggctgctggaagatgtggaggtgttggagggccgagctgcccgtttcgactgcaagatcagtggcaccccgccccctgttgttacctggactcattttggctgccccatggaggagagtgagaacttgcggctgcggcaggacgggggtctgcactcactgcacattgcccatgtgggcagcgaggacgaggggctctatgcggtcagtgctgttaacacccatggccaggcccactgctcagcccagctgtatgtagaagagccccggacagccgcctcaggccccagctcgaagctggagaagatgccatccattcccgaggagccagagcagggtgagctggagcggctgtccattcctgacttcctgcggccactgcaggacctggaggtgggactggccaaggaggccatgctagagtgccaggtgaccggcctgccctaccccaccatcagctggttccacaatggccaccgcatccagagcagcgacgaccggcgcatgacacagtacagggatgtccatcgcttggtgttccctgccgtggggcctcagcacgccggtgtctacaagagcgtcattgccaacaagctgggcaaagctgcctgctatgcccacctgtatgtcacagatgtggtcccaggccctccagatggcgccccgcaggtggtggctgtgacggggaggatggtcacactcacatggaacccccccaggagtctggacatggccatcgacccggactccctgacgtacacagtgcagcaccaggtgctgggctcggaccagtggacggcactggtcacaggcctgcgggagccagggtgggcagccacagggctgcgtaagggggtccagcacatcttccgggtcctcagcaccactgtcaagagcagcagcaagccctcacccccttctgagcctgtgcagctgctggagcacggcccaaccctggaggaggcccctgccatgctggacaaaccagacatcgtgtatgtggtggagggacagcctgccagcgtcaccgtcacattcaaccatgtggaggcccaggtcgtctggaggagctgccgaggggccctcctagaggcacgggccggtgtgtacgagctgagccagccagatgatgaccagtactgtcttcggatctgccgggtgagccgccgggacatgggggccctcacctgcaccgcccgaaaccgtcacggcacacagacctgctcggtcacattggagctggcagaggcccctcggtttgagtccatcatggaggacgtggaggtgggggctggggaaactgctcgctttgcggtggtggtcgagggaaaaccactgccggacatcatgtggtacaaggacgaggtgctgctgaccgagagcagccatgtgagcttcgtgtacgaggagaatgagtgctccctggtggtgctcagcacgggggcccaggatggaggcgtctacacctgcaccgcccagaacctggcgggtgaggtctcctgcaaagcagagttggctgtgcattcagctcagacagctatggaggtcgagggggtcggggaggatgaggaccatcgaggaaggagactcagcgacttttatgacatccaccaggagatcggcaggggtgctttctcctacttgcggcgcatagtggagcgtagctccggcctggagtttgcggccaagttcatccccagccaggccaagccaaaggcatcagcgcgtcgggaggcccggctgctggccaggctccagcacgactgtgtcctctacttccatgaggccttcgagaggcgccggggactggtcattgtcaccgagctctgcacagaggagctgctggagcgaatcgccaggaaacccaccgtgtgtgagtctgagatccgggcctatatgcggcaggtgctagagggaatacactacctgcaccagagccacgtgctgcacctcgatgtcaagcctgagaacctgctggtgtgggatggtgctgcgggcgagcagcaggtgcggatctgtgactttgggaatgcccaggagctgactccaggagagccccagtactgccagtatggcacacctgagtttgtagcacccgagattgtcaatcagagccccgtgtctggagtcactgacatctggcctgtgggtgttgttgccttcctgctgtctgacaggaatctccccgtttgttggggaaatgaccggacaacattgatgaacatccgaaactacaacgtggccttcgaggagaccacattcctgagcctgagcagggaggcccggggcttcctcatcaaagtgttggtgcaggaccggctgagacctaccgcagaagagaccctagaacatccttggttcaaaactcaggcaaagggcgcagaggtgagcacggatcacctgaagctattcctctcccggcggaggtggcagcgctcccagatcagctacaaatgccacctggtgctgcgccccatccccgagctgctgcgggcccccccagagcgggtgtgggtgaccatgcccagaaggccaccccccagtggggggctctcatcctcctcggattctgaagaggaagagctggaagagctgccctcagtgccccgcccactgcagcccgagttctctggctcccgggtgtccctcacagacattcccactgaggatgaggccctggggaccccagagactggggctgccacccccatggactggcaggagcagggaagggctccctctcaggaccaggaggctcccagcccagaggccctcccctccccaggccaggagcccgcagctggggctagccccaggcggggagagctccgcaggggcagctcggctgagagcgccctgccccgggccgggccgcgggagctgggccggggcctgcacaaggcggcgtctgtggagctgccgcagcgccggagccccggcccgggagccacccgcctggcccggggaggcctgggtgagggcgagtatgcccagaggctgcaggccctgcgccagcggctgctgcggggaggccccgaggatggcaaggtcagcggcctcaggggtcccctgctggagagcctggggggccgtgctcgggacccccggatggcacgagctgcctccagcgaggcagcgccccaccaccagcccccactcgagaaccggggcctgcaaaagagcagcagcttctcccagggtgaggcggagccccggggccggcaccgccgagcgggggcgcccctcgagatccccgtggccaggcttggggcccgtaggctacaggagtctccttccctgtctgccctcagcgaggcccagccatccagccctgcacggcccagcgcccccaaacccagtacccctaagtctgcagaaccttctgccaccacacctagtgatgctccgcagccccccgcaccccagcctgcccaagacaaggctccagagcccaggccagaaccagtccgagcctccaagcctgcaccacccccccaggccctgcaaaccctagcgctgcccctcacaccctatgctcagatcattcagtccctccagctgtcaggccacgcccagggcccctcgcagggccctgccgcgccgccttcagagcccaagccccacgctgctgtctttgccagggtggcctccccacctccgggagcccccgagaagcgcgtgccctcagccgggggtcccccggtgctagccgagaaagcccgagttcccacggtgccccccaggccaggcagcagtctcagtagcagcatcgaaaacttggagtcggaggccgtgttcgaggccaagttcaagcgcagccgcgagtcgcccctgtcgctggggctgcggctgctgagccgttcgcgctcggaggagcgcggccccttccgtggggccgaggaggaggatggcatataccggcccagcccggcggggaccccgctggagctggtgcgacggcctgagcgctcacgctcggtgcaggacctcagggctgtcggagagcctggcctcgtccgccgcctctcgctgtcactgtcccagcggctgcggcggacccctcccgcgcagcgccacccggcctgggaggcccgcggcggggacggagagagctcggagggcgggagctcggcgcggggctccccggtgctggcgatgcgcaggcggctgagcttcaccctggagcggctgtccagccgattgcagcgcagtggcagcagcgaggactcggggggcgcgtcgggccgcagcacgccgctgttcggacggcttcgcagggccacgtccgagggcgagagtctgcggcgccttggccttccgcacaaccagttggccgcccaggccggcgccaccacgccttccgccgagtccctgggctccgaggccagcgccacgtcgggctcctcagccccaggggaaagccgaagccggctccgctggggcttctctcggccgcggaaggacaaggggttatcgccaccaaacctctctgccagcgtccaggaggagttgggtcaccagtacgtgcgcagtgagtcagacttccccccagtcttccacatcaaactcaaggaccaggtgctgctggagggggaggcagccaccctgctctgcctgccagcggcctgccctgcaccgcacatctcctggatgaaagacaagaagtccttgaggtcagagccctcagtgatcatcgtgtcctgcaaagatgggcggcagctgctcagcatcccccgggcgggcaagcggcacgccggtctctatgagtgctcggccaccaacgtactgggcagcatcaccagctcctgtaccgtggctgtggcccgagtcccaggaaagctagctcctccagaggtaccccagacctaccaggacacggcgctggtgctgtggaagccgggagacagccgggcaccttgcacgtatacgctggagcggcgagtggatggggagtctgtgtggcaccctgtgagctcaggcatccccgactgttactacaacgtgacccacctgccagttggcgtgactgtgaggttccgtgtggcctgtgccaaccgtgctgggcaggggcccttcagcaactcttctgagaaggtctttgtcaggggtactcaagattcttcagctgtgccatctgctgcccaccaagaggcccctgtcacctcaaggtcagtcagggcccggcctcctgactctcctacctcactggcctcacccctagctcctgctgcccccacacccccgtcagtcactgtcagcccctcatctccccccacacctcctagccaggccttgtcctcgctcaaggctgtgggtccaccaccccaaacccctccacgaagacacaggggcctgcaggctgcccggccagcggagcccaccctacccagtacccacgtcaccccaagtgagccccagcctttcgtccttgacactgggaccccgatcccagcctccactcctcaaggggttaaaccagtgtcttcctctactcctgtgtatgtggtgacttcctttgtgtctgcaccaccagcccctgagcccccagcccctgagccccctcctgagcctaccaaggtgactgtgcagagcctcagcccggccaaggaggtggtcagctcccctgggagcagtccccgaagctctcccaggcctgagggtaccactcttcgacagggtccccctcagaaaccctacaccttcctggaggagaaagccaggggccgctttggtgttgtgcgagcgtgccgggagaatgccacggggcgaacgttcgtggccaagatcgtgccctatgctgccgagggcaagccgcgggtcctgcaggagtacgaggtgatgcggaccctgcaccacgagcggatcatgtccatgcacgaggcctacatcacccctcggtacctcgtgctcattgctgagagctgtggcaaccgggaactcctctgtgggctcagtgacaggttccggtattctgaggatgacgtggccacttacatggtgcagctgctacaaggcctggactacctccacggccaccacgtgctccacctagacatcaagccagacaacctgctgctggcccctgacaatgccctcaagattgtggactttggcagtgcccagccctacaacccccaggcccttaggccccttggccaccgcacgggcacgctggagttcatggctccggagatggtgaagggagaacccatcggctctgccacggacatctggggagcgggtgtgctcacttacattatgctcagtggacgctccccgttctatgagccagacccccaggaaacggaggctcggattgtggggggccgctttgatgccttccagctgtaccccaatacatcccagagcgccaccctcttcttgcgaaaggttctctctgtacatccctggagccggccctccctgcaggactgcctggcccacccatggttgcaggacgcctacctgatgaagctgcgccgccagacgctcaccttcaccaccaaccggctcaaggagttcctgggcgagcagcggcggcgccgggctgaggctgccacccgccacaaggtgctgctgcgctcctaccctggcggcccctagaggcacggaccacagccaggcctcgggcttcaactggggttcccaccaatgccacgggacattccagggcccacgctgagccaggcgggcctggggcttcggttaccaccagcagcaacatctggctgggctcttacctcatagaccttcaaggacagagaccccagggcctggacctgatgccaccccaggccaaagccagagtgggagacccattggtcaggctcagcagggtgggaacaggcagagggacaagaggggaatggagaagtggagaggaaaaggaatcgagggacaggaagg

SEQ ID NO: 36 - protein, 3252 aa, Homo sapiens
MQKARGTRGEDAGTRAPPSPGVPPKRAKVGAGGGAPVAVAGAPVFLRPLKNAAVCAGSDVRLRVVVSGTPHPILRWFRDGQLLPAPAPEPSCLWLRRCGAQDAGVYSCMAQNERGRASCEAVLTVLEVGDSETAEDDISDVQGTQRLELRDDGAFSTPTGGSDTLVGTSLDTPPTSVTGTSEEQVSWWGSGQTVLEQEAGSGGGTRRLPGSPRQAQATGAGPRHLGVEPLVRASRANLVGASWGSEDSLSVASDLYGSAFSLYRGRALSIHVSVPQSGLRREEPDLQPQLASEAPRRPAQPPPSKSALLPPPSPRVGKRSPPGPPAQPAATPTSPHRRTQEPVLPEDTTTEEKRGKKSKSSGPSLAGTAESRPQTPLSEASGRLSALGRSPRLVRAGSRILDKLQFFEERRRSLERSDSPPAPLRPWVPLRKARSLEQPKSERGAPWGTPGASQEELRAPGSVAERRRLFQQKAASLDERTRQRSPASDLELRFAQELGRIRRSTSREELVRSHESLRATLQRAPSPREPGEPPLFSRPSTPKTSRAVSPAAAQPPSPSSAEKPGDEPGRPRSRGPAGRTEPGEGPQQEVRRRDQFPLTRSRAIQECRSPVPPPAADPPEARTKAPPGRKREPPAQAVRFLPWATPGLEGAAVPQTLEKNRAGPEAEKRLRRGPEEDGPWGPWDRRGARSQGKGRRARPTSPELESSDDSYVSAGEEPLEAPVFEIPLQNVVVAPGADVLLKCIITANPPPQVSWHKDGSALRSEGRLLLRAEGERHTLLLREARAADAGSYMATATNELGQATCAASLTVRPGGSTSPFSSPITSDEEYLSPPEEFPEPGETWPRTPTMKPSPSQNRRSSDTGSKAPPTFKVSLMDQSVREGQDVIMSIRVQGEPKPVVSWLRNRQPVRPDQRRFAEEAEGGLCRLRILAAERGDAGFYTCKAVNEYGARQCEARLRSEDVDVGAGEMALFECLVAGPTDVEVDWLCRGRLLQPALLKCKMHFDGRKCKLLLTSVHEDDSGVYTCKLSTAKDELTCSARLTVRPSLAPLFTRLLEDVEVLEGRAARFDCKISGTPPPVVTWTHFGCPMEESENLRLRQDGGLHSLHIAHVGSEDEGLYAVSAVNTHGQAHCSAQLYVEEPRTAASGPSSKLEKMPSIPEEPEQGELERLSIPDFLRPLQDLEVGLAKEAMLECQVTGLPYPTISWFHNGHRIQSSDDRRMTQYRDVHRLVFPAVGPQHAGVYKSVIANKLGKAACYAHLYVTDVVPGPPDGAPQVVAVTGRMVTLTWNPPRSLDMAIDPDSLTYTVQHQVLGSDQWTALVTGLREPGWAATGLRKGVQHIFRVLSTTVKSSSKPSPPSEPVQLLEHGPTLEEAPAMLDKPDIVYVVEGQPASVTVTFNHVEAQVVWRSCRGALLEARAGVYELSQPDDDQYCLRICRVSRRDMGALTCTARNRHGTQTCSVTLELAEAPRFESIMEDVEVGAGETARFAVVVEGKPLPDIMWYKDEVLLTESSHVSFVYEENECSLVVLSTGAQDGGVYTCTAQNLAGEVSCKAELAVHSAQTAMEVEGVGEDEDHRGRRLSDFYDIHQEIGRGAFSYLRRIVERSSGLEFAAKFIPSQAKPKASARREARLLARLQHDCVLYFHEAFERRRGLVIVTELCTEELLERIARKPTVCESEIRAYMRQVLEGIHYLHQSHVLHLDVKPENLLVWDGAAGEQQVRICDFGNAQELTPGEPQYCQYGTPEFVAPEIVNQSPVSGVTDIWPVGVVAFLLSDRNLPVCWGNDRTTLMNIRNYNVAFEETTFLSLSREARGFLIKVLVQDRLRPTAEETLEHPWFKTQAKGAEVSTDHLKLFLSRRRWQRSQISYKCHLVLRPIPELLRAPPERVWVTMPRRPPPSGGLSSSSDSEEEELEELPSVPRPLQPEFSGSRVSLTDIPTEDEALGTPETGAATPMDWQEQGRAPSQDQEAPSPEALPSPGQEPAAGASPRRGELRRGSSAESALPRAGPRELGRGLHKAASVELPQRRSPGPGATRLARGGLGEGEYAQRLQALRQRLLRGGPEDGKVSGLRGPLLESLGGRARDPRMARAASSEAAPHHQPPLENRGLQKSSSFSQGEAEPRGRHRRAGAPLEIPVARLGARRLQESPSLSALSEAQPSSPARPSAPKPSTPKSAEPSATTPSDAPQPPAPQPAQDKAPEPRPEPVRASKPAPPPQALQTLALPLTPYAQIIQSLQLSGHAQGPSQGPAAPPSEPKPHAAVFARVASPPPGAPEKRVPSAGGPPVLAEKARVPTVPPRPGSSLSSSIENLESEAVFEAKFKRSRESPLSLGLRLLSRSRSEERGPFRGAEEEDGIYRPSPAGTPLELVRRPERSRSVQDLRAVGEPGLVRRLSLSLSQRLRRTPPAQRHPAWEARGGDGESSEGGSSARGSPVLAMRRRLSFTLERLSSRLQRSGSSEDSGGASGRSTPLFGRLRRATSEGESLRRLGLPHNQLAAQAGATTPSAESLGSEASATSGSSAPGESRSRLRWGFSRPRKDKGLSPPNLSASVQEELGHQYVRSESDFPPVFHIKLKDQVLLEGEAATLLCLPAACPAPHISWMKDKKSLRSEPSVIIVSCKDGRQLLSIPRAGKRHAGLYECSATNVLGSITSSCTVAVARVPGKLAPPEVPQTYQDTALVLWKPGDSRAPCTYTLERRVDGESVWHPVSSGIPDCYYNVTHLPVGVTVRFRVACANRAGQGPFSNSSEKVFVRGTQDSSAVPSAAHQEAPVTSRSVRARPPDSPTSLASPLAPAAPTPPSVTVSPSSPPTPPSQALSSLKAVGPPPQTPPRRHRGLQAARPAEPTLPSTHVTPSEPQPFVLDTGTPIPASTPQGVKPVSSSTPVYVVTSFVSAPPAPEPPAPEPPPEPTKVTVQSLSPAKEVVSSPGSSPRSSPRPEGTTLRQGPPQKPYTFLEEKARGRFGVVRACRENATGRTFVAKIVPYAAEGKPRVLQEYEVMRTLHHERIMSMHEAYITPRYLVLIAESCGNRELLCGLSDRFRYSEDDVATYMVQLLQGLDYLHGHHVLHLDIKPDNLLLAPDNALKIVDFGSAQPYNPQALRPLGHRTGTLEFMAPEMVKGEPIGSATDIWGAGVLTYIMLSGRSPFYEPDPQETEARIVGGRFDAFQLYPNTSQSATLFLRKVLSVHPWSRPSLQDCLAHPWLQDAYLMKLRRQTLTFTTNRLKEFLGEQRRRRAEAATRHKVLLRSYPGGP

SEQ ID NO: 37 - DNA, 9698 bp, Homo sapiens
  CDS (61)..(9684)
ccgcgggtgcccccgtggccgcccagttccggcgtccccccagcccagctctcagtggccatgcagaaagcccggggcacgcgaggcgaggatgcgggcacgagggcaccccccagccccggagtgcccccgaaaagggccaaggtgggggccggcggcggggctcctgtggccgtggccggggcgccagtcttcctgcggcccctgaagaacgcggcggtgtgcgcgggcagcgacgtgcggctgcgggtggtggtgagcgggacgccccagcccagcctccgctggttccgggatgggcagctcctgcccgcgccggcccccgagcccagctgcctgtggctgcggcgctgcggggcgcaggacgccggcgtgtacagctgcatggcccagaacgagcggggccgggcctcctgcgaggcggtgctcacagtgctggaggtcggagactcagagacggctgaggatgacatcagcgatgtgcagggaacccagcgcctggagcttcgggatgacggggccttcagcacccccacggggggttctgacaccctggtgggcacctccctggacacacccccgacctccgtgacaggcacctcagaggagcaagtgagctggtggggcagcgggcagacggtcctggagcaggaagcgggcagtgggggtggcacccgccgcctcccgggcagcccaagcagcgtccctcagagcgggttgcgcagggaggagcccgaccttcagcctcaactggccagcgaagccccacgccgccctgcccagccgcctccttccaaatccgcgctgctccccccaccgtcccctcgggtcgggaagcggtccccgccgggacccccggcccagcccgcggccacccccacgtcgccccaccgtcgcactcaggagcctgtgctgcccgaggacaccaccaccgaagagaagcgagggaagaagtccaagtcgtccgggccctccctggcgggcaccgcggaatcccgaccccagacgccactgagcgaggcctcaggccgcctgtcggcgttgggccgatcgcctaggctggtgcgcgccggctcccgcatcctggacaagctgcagttcttcgaggagcgacggcgcagcctggagcgcagcgactcgccgccggcgcccctgcggccctgggtgcccctgcgcaaggcccgctctctggagcagcccaagtcggagcgcggcgcaccgtggggcacccccggggcctcgcaggaagaactgcgggcgccaggcagcgtggccgagcggcgccgcctgttccagcagaaagcggcctcgctggacgagcgcacgcgtcagcgcagcccggcctcagacctcgagctgcgcttcgcccaggagctgggccgcatccgccgctccacgtcgcgggaggagctggtgcgctcgcacgagtccctgcgcgccacgctgcagcgtgccccatcccctcgagagcccggcgagcccccgctcttctctcggccctccacccccaagacatcgcgggccgtgagccccgccgccgcccagccgccctctccgagcagcgcggagaagccgggggacgagcctgggaggcccaggagccgcgggccggcgggcaggacagagccgggggaaggcccgcagcaggaggttaggcgtcgggaccaattcccgctgacccggagcagagccatccaggagtgcaggagccctgtgccgccccccgccgccgatcccccagaggccaggacgaaagcaccccccggtcggaagcgggagcccccggcgcaggccgtgcgcttcctgccctgggccacgccgggcctggagggcgctgctgtaccccagaccttggagaagaacagggcggggcctgaggcagagaagaggcttcgcagagggccggaggaggacggtccctgggggccctgggaccgccgaggggcccgcagccagggcaaaggtcgccgggcccggcccacctcccctgagctcgagtcttcggatgactcctacgtgtccgctggagaagagcccctagaggcccctgtgtttgagatccccctgcagaatgtggtggtggcaccaggggcagatgtgctgctcaagtgtatcatcactgccaaccccccgccccaagtgtcctggcacaaggatgggtcagcgctgcgcagcgagggccgcctcctcctccgggctgagggtgagcggcacaccctgctgctcagggaggccagggcagcagatgccgggagctatatggccaccgccaccaacgagctgggccaggccacctgtgccgcctcactgaccgtgagacccggtgggtctacatcccctttcagcagccccatcacctccgacgaggaatacctgagccccccagaggagttcccagagcctggggagacctggccgcgaacccccaccatgaagcccagtcccagccagaaccgccgttcttctgacactggctccaaggcaccccccaccttcaaggtctcacttatggaccagtcagtaagagaaggccaagatgtcatcatgagcatccgcgtgcagggggagcccaagcctgtggtctcctggctgagaaaccgccagcccgtgcgcccagaccagcggcgctttgcggaggaggctgagggtgggctgtgccggctgcggatcctggctgcagagcgtggcgatgctggtttctacacttgcaaagcggtcaatgagtatggtgctcggcagtgcgaggcccgcttggaggtccgagcacaccctgaaagccggtccctggccgtgctggcccccctgcaggacgtggacgtgggggccggggagatggcgctgtttgagtgcctggtggcggggcccactgacgtggaggtggattggctgtgccgtggccgcctgctgcagcctgcactgctcaaatgcaagatgcatttcgatggccgcaaatgcaagctgctacttacatctgtacatgaggacgacagtggcgtctacacctgcaagctcagcacggccaaagatgagctgacctgcagtgcccggctgaccgtgcggccctcgttggcacccctgttcacacggctgctggaagatgtggaggtgttggagggccgagctgcccgtttcgactgcaagatcagtggcaccccgccccctgttgttacctggactcattttggctgccccatggaggagagtgagaacttgcggctgcggcaggacgggggtctgcactcactgcacattgcccatgtgggcagcgaggacgaggggctctatgcggtcagtgctgttaacacccatggccaggcccactgctcagcccagctgtatgtagaagagccccggacagccgcctcaggccccagctcgaagctggagaagatgccatccattcccgaggagccagagcagggtgagctggagcggctgtccattcccgacttcctgcggccactgcaggacctggaggtgggactggccaaggaggccatgctagagtgccaggtgaccggcctgccctaccccaccatcagctggttccacaatggccaccgcatccagagcagcgacgaccggcgcatgacacagtacagggatgtccatcgcttggtgttccctgccgtggggcctcagcacgccggtgtctacaagagcgtcattgccaacaagctgggcaaagctgcctgctatgcccacctgtatgtcacagatgtggtcccaggccctccagatggcgccccgcaggtggtggctgtgacggggaggatggtcacactcacatggaacccccccaggagtctggacatggccatcgacccggactccctgacgtacacagtgcagcaccaggtgctgggctcggaccagtggacggcactggtcacaggcctgcgggagccagggtgggcagccacagggctgcgtaagggggtccagcacatcttccgggtcctcagcaccactgtcaagagcagcagcaagccctcacccccttctgagcctgtgcagctgctggagcacggcccaaccctggaggaggcccctgccatgctggacaaaccagacatcgtgtatgtggtggagggacagcctgccagcgtcaccgtcacattcaaccatgtggaggcccaggtcgtctggaggagctgccgaggggccctcctagaggcacgggccggtgtgtacgagctgagccagccagatgatgaccagtactgtcttcggatctgccgggtgagccgccgggacatgggggccctcacctgcaccgcccgaaaccgtcacggcacacagacctgctcggtcacattggagctggcagaggcccctcggtttgagtccatcatggaggacgtggaggtgggggctggggaaactgctcgctttgcggtggtggtcgagggaaaaccactgccggacatcatgtggtacaaggacgaggtgctgctgaccgagagcagccatgtgagcttcgtgtacgaggagaatgagtgctccctggtggtgctcagcacgggggcccaggatggaggcgtctacacctgcaccgcccagaacctggcgggtgaggtctcctgcaaagcagagttggctgtgcattcagctcagacagctatggaggtcgagggggtcggggaggatgaggaccatcgaggaaggagactcagcgacttttatgacatccaccaggagatcggcaggggtgctttctcctacttgcggcgcatagtggagcgtagctccggcctggagtttgcggccaagttcatccccagccaggccaagccaaaggcatcagcgcgtcgggaggcccggctgctggccaggctccagcacgactgtgtcctctacttccatgaggccttcgagaggcgccggggactggtcattgtcaccgagctctgcacagaggagctgctggagcgaatcgccaggaaacccaccgtgtgtgagtctgagatccgggcctatatgcggcaggtgctagagggaatacactacctgcaccagagccacgtgctgcacctcgatgtcaagcctgagaacctgctggtgtgggatggtgctgcgggcgagcagcaggtgcggatctgtgactttgggaatgcccaggagctgactccaggagagccccagtactgccagtatggcacacctgagtttgtagcacccgagattgtcaatcagagccccgtgtctggagtcactgacatctggcctgtgggtgttgttgccttcctctgtctgacaggaatctccccgtttgttggggaaaatgaccggacaacattgatgaacatccgaaactacaacgtggccttcgaggagaccacattcctgagcctgagcagggaggcccggggcttcctcatcaaagtgttggtgcaggaccggctgagacctaccgcagaagagaccctagaacatccttggttcaaaactcaggcaaagggcgcagaggtgagcacggatcacctgaagctattcctctcccggcggaggtggcagcgctcccagatcagctacaaatgccacctggtgctgcgccccatccccgagctgctgcgggcccccccagagcgggtgtgggtgaccatgcccagaaggccaccccccagtggggggctctcatcctcctcggattctgaagaggaagagctggaagagctgccctcagtgccccgcccactgcagcccgagttctctggctcccgggtgtccctcacagacattcccactgaggatgaggccctggggaccccagagactggggctgccacccccatggactggcaggagcagggaagggctccctctcaggaccaggaggctcccagcccagaggccctcccctccccaggccaggagcccgcagctggggctagccccaggcggggagagctccgcaggggcagctcggctgagagcgccctgccccgggccgggccgcgggagctgggccggggcctgcacaaggcggcgtctgtggagctgccgcagcgccggagccccggcccgggagccacccgcctggcccggggaggcctgggtgagggcgagtatgcccagaggctgcaggccctgcgccagcggctgctgcggggaggccccgaggatggcaaggtcagcggcctcaggggtcccctgctggagagcctggggggccgtgctcgggacccccggatggcacgagctgcctccagcgaggcagcgccccaccaccagcccccactcgagaaccggggcctgcaaaagagcagcagcttctcccagggtgaggcggagccccggggccggcaccgccgagcgggggcgcccctcgagatccccgtggccaggcttggggcccgtaggctacaggagtctccttccctgtctgccctcagcgaggcccagccatccagccctgcacggcccagcgcccccaaacccagtacccctaagtctgcagaaccttctgccaccacacctagtgatgctccgcagccccccgcaccccagcctgcccaagacaaggctccagagcccaggccagaaccagtccgagcctccaagcctgcaccacccccccaggccctgcaaaccctagcgctgcccctcacaccctatgctcagatcattcagtccctccagctgtcaggccacgcccagggcccctcgcagggccctgccgcgccgccttcagagcccaagccccacgctgctgtctttgccagggtggcctccccacctccgggagcccccgagaagcgcgtgccctcagccgggggtcccccggtgctagccgagaaagcccgagttcccacggtgccccccaggccaggcagcagtctcagtagcagcatcgaaaacttggagtcggaggccgtgttcgaggccaagttcaagcgcagccgcgagtcgcccctgtcgctggggctgcggctgctgagccgttcgcgctcggaggagcgcggccccttccgtggggccgaggaggaggatggcatataccggcccagcccggcggggaccccgctggagctggtgcgacggcctgagcgctcacgctcggtgcaggacctcagggctgtcggagagcctggcctcgtccgccgcctctcgctgtcactgtcccagcggctgcggcggacccctcccgcgcagcgccacccggcctgggaggcccgcggcggggacggagagagctcggagggcgggagctcggcgcggggctccccggtgctggcgatgcgcaggcggctgagcttcaccctggagcggctgtccagccgattgcagcgcagtggcagcagcgaggactcggggggcgcgtcgggccgcagcacgccgctgttcggacggcttcgcagggccacgtccgagggcgagagtctgcggcgccttggccttccgcacaaccagttggccgcccaggccggcgccaccacgccttccgccgagtccctgggctccgaggccagcgccacgtcgggctcctcagccccaggggaaagccgaagccggctccgctggggcttctctcggccgcggaaggacaaggggttatcgccaccaaacctctctgccagcgtccaggaggagttgggtcaccagtacgtgcgcagtgagtcagacttccccccagtcttccacatcaaactcaaggaccaggtgctgctggagggggaggcagccaccctgctctgcctgccagcggcctgccctgcaccgcacatctcctggatgaaagacaagaagtccttgaggtcagagccctcagtgatcatcgtgtcctgcaaagatgggcggcagctgctcagcatcccccgggcgggcaagcggcacgccggtctctatgagtgctcggccaccaacgtactgggcagcatcaccagctcctgtaccgtggctgtggcccgagtcccaggaaagctagctcctccagaggtaccccagacctaccaggacacggcgctggtgctgtggaagccgggagacagccgggcaccttgcacgtatacgctggagcggcgagtggatggggagtctgtgtggcaccctgtgagctcaggcatccccgactgttactacaacgtgacccacctgccagttggcgtgactgtgaggttccgtgtggcctgtgccaaccgtgctgggcaggggcccttcagcaactcttctgagaaggtctttgtcaggggtactcaagattcttcagctgtgccatctgctgcccaccaagaggcccctgtcacctcaaggccagccagggcccggcctcctgactctcctacctcactggccccacccctagctcctgctgcccccacacccccgtcagtcactgtcagcccctcatctccccccacacctcctagccaggccttgtcctcgctcaaggctgtgggtccaccaccccaaacccctccacgaagacacaggggcctgcaggctgcccggccagcggagcccaccctacccagtacccacgtcaccccaagtgagcccaagcctttcgtccttgacactgggaccccgatcccagcctccactcctcaaggggttaaaccagtgtcttcctctactcctgtgtatgtggtgacttcctttgtgtctgcaccaccagcccctgagcccccagcccctgagccccctcctgagcctaccaaggtgactgtgcagagcctcagcccggccaaggaggtggtcagctcccctgggagcagtccccgaagctctcccaggcctgagggtaccactcttcgacagggtccccctcagaaaccctacaccttcctggaggagaaagccaggggccgctttggtgttgtgcgagcgtgccgggagaatgccacggggcgaacgttcgtggccaagatcgtgccctatgctgccgagggcaagcggcgggtcctgcaggagtatgaggtgctgcggaccctgcaccacgagcggatcatgtccctgcacgaggcctacatcacccctcggtacctcgtgctcattgctgagagctgtggcaaccgggaactcctctgtgggctcagtgacaggttccggtattctgaggatgacgtggccacttacatggtgcagctgctacaaggcctggactacctccacggccaccacgtgctccacctagacatcaagccagacaacctgctgctggcccctgacaatgccctcaagattgtggactttggcagtgcccagccctacaacccccaggcccttaggccccttggccaccgcacgggcacgctggagttcatggctccggagatggtgaagggagaacccatcggctctgccacggacatctggggagcgggtgtgctcacttacattatgctcagtggacgctccccgttctatgagccagacccccaggaaacggaggctcggattgtggggggccgctttgatgccttccagctgtaccccaatacatcccagagcgccaccctcttcttgcgaaaggttctctctgtacatccctggagccggccctccctgcaggactgcctggcccacccatggttgcaggacgcctacctgatgaagctgcgccgccagacgctcaccttcaccaccaaccggctcaaggagttcctgggcgagcagcggcggcgccgggctgaggctgccacccgccacaaggtgctgctgcgctcctaccctggcggcccctaggcggccgctat

SEQ ID NO: 38 - protein, 3208 aa, Homo sapiens
MQKARGTRGEDAGTRAPPSPGVPPKRAKVGAGGGAPVAVAGAPVFLRPLKNAAVCAGSDVRLRVVVSGTPQPSLRWFRDGQLLPAPAPEPSCLWLRRCGAQDAGVYSCMAQNERGRASCEAVLTVLEVGDSETAEDDISDVQGTQRLELRDDGAFSTPTGGSDTLVGTSLDTPPTSVTGTSEEQVSWWGSGQTVLEQEAGSGGGTRRLPGSPSSVPQSGLRREEPDLQPQLASEAPRRPAQPPPSKSALLPPPSPRVGKRSPPGPPAQPAATPTSPHRRTQEPVLPEDTTTEEKRGKKSKSSGPSLAGTAESRPQTPLSEASGRLSALGRSPRLVRAGSRILDKLQFFEERRRSLERSDSPPAPLRPWVPLRKARSLEQPKSERGAPWGTPGASQEELRAPGSVAERRRLFQQKAASLDERTRQRSPASDLELRFAQELGRIRRSTSREELVRSHESLRATLQRAPSPREPGEPPLFSRPSTPKTSRAVSPAAAQPPSPSSAEKPGDEPGRPRSRGPAGRTEPGEGPQQEVRRRDQFPLTRSRAIQECRSPVPPPAADPPEARTKAPPGRKREPPAQAVRFLPWATPGLEGAAVPQTLEKNRAGPEAEKRLRRGPEEDGPWGPWDRRGARSQGKGRRARPTSPELESSDDSYVSAGEEPLEAPVFEIPLQNVVVAPGADVLLKCIITANPPPQVSWHKDGSALRSEGRLLLRAEGERHTLLLREARAADAGSYMATATNELGQATCAASLTVRPGGSTSPFSSPITSDEEYLSPPEEFPEPGETWPRTPTMKPSPSQNRRSSDTGSKAPPTFKVSLMDQSVREGQDVIMSIRVQGEPKPVVSWLRNRQPVRPDQRRFAEEAEGGLCRLRILAAERGDAGFYTCKAVNEYGARQCEARLEVRAHPESRSLAVLAPLQDVDVGAGEMALFECLVAGPTDVEVDWLCRGRLLQPALLKCKMHFDGRKCKLLLTSVHEDDSGVYTCKLSTAKDELTCSARLTVRPSLAPLFTRLLEDVEVLEGRAARFDCKISGTPPPVVTWTHFGCPMEESENLRLRQDGGLHSLHIAHVGSEDEGLYAVSAVNTHGQAHCSAQLYVEEPRTAASGPSSKLEKMPSIPEEPEQGELERLSIPDFLRPLQDLEVGLAKEAMLECQVTGLPYPTISWFHNGHRIQSSDDRRMTQYRDVHRLVFPAVGPQHAGVYKSVIANKLGKAACYAHLYVTDVVPGPPDGAPQVVAVTGRMVTLTWNPPRSLDMAIDPDSLTYTVQHQVLGSDQWTALVTGLREPGWAATGLRKGVQHIFRVLSTTVKSSSKPSPPSEPVQLLEHGPTLEEAPAMLDKPDIVYVVEGQPASVTVTFNHVEAQVVWRSCRGALLEARAGVYELSQPDDDQYCLRICRVSRRDMGALTCTARNRHGTQTCSVTLELAEAPRFESIMEDVEVGAGETARFAVVVEGKPLPDIMWYKDEVLLTESSHVSFVYEENECSLVVLSTGAQDGGVYTCTAQNLAGEVSCKAELAVHSAQTAMEVEGVGEDEDHRGRRLSDFYDIHQEIGRGAFSYLRRIVERSSGLEFAAKFIPSQAKPKASARREARLLARLQHDCVLYFHEAFERRRGLVIVTELCTEELLERIARKPTVCESEIRAYMRQVLEGIHYLHQSHVLHLDVKPENLLVWDGAAGEQQVRICDFGNAQELTPGEPQYCQYGTPEFVAPEIVNQSPVSGVTDIWPVGVVAFLCLTGISPFVGENDRTTLMNIRNYNVAFEETTFLSLSREARGFLIKVLVQDRLRPTAEETLEHPWFKTQAKGAEVSTDHLKLFLSRRRWQRSQISYKCHLVLRPIPELLRAPPERVWVTMPRRPPPSGGLSSSSDSEEEELEELPSVPRPLQPEFSGSRVSLTDIPTEDEALGTPETGAATPMDWQEQGRAPSQDQEAPSPEALPSPGQEPAAGASPRRGELRRGSSAESALPRAGPRELGRGLHKAASVELPQRRSPGPGATRLARGGLGEGEYAQRLQALRQRLLRGGPEDGKVSGLRGPLLESLGGRARDPRMARAASSEAAPHHQPPLENRGLQKSSSFSQGEAEPRGRHRRAGAPLEIPVARLGARRLQESPSLSALSEAQPSSPARPSAPKPSTPKSAEPSATTPSDAPQPPAPQPAQDKAPEPRPEPVRASKPAPPPQALQTLALPLTPYAQIIQSLQLSGHAQGPSQGPAAPPSEPKPHAAVFARVASPPPGAPEKRVPSAGGPPVLAEKARVPTVPPRPGSSLSSSIENLESEAVFEAKFKRSRESPLSLGLRLLSRSRSEERGPFRGAEEEDGIYRPSPAGTPLELVRRPERSRSVQDLRAVGEPGLVRRLSLSLSQRLRRTPPAQRHPAWEARGGDGESSEGGSSARGSPVLAMRRRLSFTLERLSSRLQRSGSSEDSGGASGRSTPLFGRLRRATSEGESLRRLGLPHNQLAAQAGATTPSAESLGSEASATSGSSAPGESRSRLRWGFSRPRKDKGLSPPNLSASVQEELGHQYVRSESDFPPVFHIKLKDQVLLEGEAATLLCLPAACPAPHISWMKDKKSLRSEPSVIIVSCKDGRQLLSIPRAGKRHAGLYECSATNVLGSITSSCTVAVARVPGKLAPPEVPQTYQDTALVLWKPGDSRAPCTYTLERRVDGESVWHPVSSGIPDCYYNVTHLPVGVTVRFRVACANRAGQGPFSNSSEKVFVRGTQDSSAVPSAAHQEAPVTSRPARARPPDSPTSLAPPLAPAAPTPPSVTVSPSSPPTPPSQALSSLKAVGPPPQTPPRRHRGLQAARPAEPTLPSTHVTPSEPKPFVLDTGTPIPASTPQGVKPVSSSTPVYVVTSFVSAPPAPEPPAPEPPPEPTKVTVQSLSPAKEVVSSPGSSPRSSPRPEGTTLRQGPPQKPYTFLEEKARGRFGVVRACRENATGRTFVAKIVPYAAEGKRRVLQEYEVLRTLHHERIMSLHEAYITPRYLVLIAESCGNRELLCGLSDRFRYSEDDVATYMVQLLQGLDYLHGHHVLHLDIKPDNLLLAPDNALKIVDFGSAQPYNPQALRPLGHRTGTLEFMAPEMVKGEPIGSATDIWGAGVLTYIMLSGRSPFYEPDPQETEARIVGGRFDAFQLYPNTSQSATLFLRKVLSVHPWSRPSLQDCLAHPWLQDAYLMKLRRQTLTFTTNRLKEFLGEQRRRRAEAATRHKVLLRSYPGGP

SEQ ID NO: 39 - DNA, 860 bp, Homo sapiens
  CDS (1)..(846)
acgggatccaccatggaccatcgaggaaggagactcagcgacttttatgacatccaccaggagatcggcaggggtgctttctcctacttgcggcgcatagtggagcgtagctccggcctggagtttgcggccaagttcatccccagccaggccaagccaaaggcatcagcgcgtcgggaggcccggctgctggccaggctccagcacgactgtgtcctctacttccatgaggccttcgagaggcgccggggactggtcattgtcaccgagctctgcacagaggagctgctggagcgaatcgccaggaaacccaccgtgtgtgagtctgagatccgggcctatatgcggcaggtgctagagggaatacactacctgcaccagagccacgtgctgcacctcgatgtcaagcctgagaacctgctggtgtgggatggtgctgcgggcgagcagcaggtgcggatctgtgactttgggaatgcccaggagctgactccaggagagccccagtactgccagtatggcacacctgagtttgtagcacccgagattgtcaatcagagccccgtgtctggagtcactgacatctggcctgtgggtgttgttgccttcctctgtctgacaggaatctccccgtttgttggggaaaatgaccggacaacattgatgaacatccgaaactacaacgtggccttcgaggagaccacattcctgagcctgagcagggaggcccggggcttcctcatcaaagtgttggtgcaggaccggctgagacctaccgcagaagagaccctagaacatccttggttcaaaactcaggcaaagggcgcacatcatcaccaccatcactaggcggccgcaag

SEQ ID NO: 40 - protein, 282 aa, Homo sapiens
TGSTMDHRGRRLSDFYDIHQEIGRGAFSYLRRIVERSSGLEFAAKFIPSQAKPKASARREARLLARLQHDCVLYFHEAFERRRGLVIVTELCTEELLERIARKPTVCESEIRAYMRQVLEGIHYLHQSHVLHLDVKPENLLVWDGAAGEQQVRICDFGNAQELTPGEPQYCQYGTPEFVAPEIVNQSPVSGVTDIWPVGVVAFLCLTGISPFVGENDRTTLMNIRNYNVAFEETTFLSLSREARGFLIKVLVQDRLRPTAEETLEHPWFKTQAKGAHHHHHH

SEQ ID NO: 41 - DNA, 3109 bp, Homo sapiens
  CDS (75)..(1478)
aggggctgaggaggtactggaaaagaaagaggagcaggagctggaggaagacgtggaggaggagctggaggaggatgaagagaaggagtgggacgcccacaaccctgtgtaaggagctcaagtactccaaggacccgccccagatatccatcatattcatcttcgtgaacgaggccctgtcggtgatcctgcggtccgtgcacagtgccgtcaatcacacgcccacacacctgctgaaggaaatcattctggtggatgacaacagcgacgaagaggagctgaaggtccccctagaggagtatgtccacaaacgctaccccgggctggtgaaggtggtaagaaatcagaagagggaaggcctgatccgcgctcgcattgagggctggaaggtggctaccgggcaggtcactggcttctttgatgcccacgtggaattcaccgctggctgggctgagccggttctatcccgcatccaggaaaaccggaagcgtgtgatcctcccctccattgacaacatcaaacaggacaactttgaggtgcagcggtacgagaactcggcccacgggtacagctgggagctgtggtgcatgtacatcagccccccaaaagactggtgggacgccggagacccttctctccccatcaggaccccagccatgataggctgctcgttcgtggtcaacaggaagttcttcggtgaaattggtcttctggatcctggcatggatgtatacggaggagaaaatattgaactgggaatcaaggtatggctctgtgggggcagcatggaggtccttccttgctcacgggtggcccacattgagcggaagaagaagccatataatagcaacattggcttctacaccaagaggaatgctcttcgcgttgctgaggtctggatggacgattacaagtctcatgtgtacatagcgtggaacctgccgctggagaatccgggaattgacatcggtgatgtctccgaaagaagagcattaaggaaaagtttaaagtgtaagaatttccagtggtacctggaccatgtttacccagaaatgagaagatacaataataccgttgcttacggggagcttcgcaacaacaaggcaaaagacgtctgcttggaccaggggccgctggagaaccacacagcaatattgtatccgtgccatggctggggaccacagcttgcccgctacaccaaggaaggcttcctgcacttgggtgccctggggaccaccacactcctccctgacacccgctgcctggtggacaactccaagagtcggctgccccagctcctggactgcgacaaggtcaagagcagcctgtacaagcgctggaacttcatccagaatggagccatcatgaacaagggcacgggacgctgcctggaggtggagaaccggggcctggctggcatcgacctcatcctccgcagctgcacaggtcagaggtggaccattaagaactccatcaagtagagggagggagctggggcactggagcctggcccccaggacatggctgctccccccaacatctggaccagctgccctggcggagagacagcaaggggccggcaggtgctcgatgggccccccagggcttctccagggcagcacagggaccccggatgaagactctgtcccccctcaggcattcagctgcccacaagtttcctgcaccctggaaaagccccccacccttcctctgggaaactgacagctgtcttccacagcctctgatgtggacctggtactgaggagcaagactgtccagttctcctccacatctcccatcccagaatcaggatctgggactggcagggtcccctcctgtgtctcatctcttgcagcagcagctgctgaactccagccatcaacacggtgggaggcagcgggggcttcagccatgtcctagctccccgccctaaaaggaggcagtgaggaccaggcactatttcctccgaggttacttctacccagatgacacctgcctgttcacgccccaaggcagctactgcccctaacccttcccaccagggtagctttgggcactgcagctctggacttttctggcccctcctgagatgacctgatggagctgatgctttctctcctaatccctgggcactaggctcttatcagtgtgcttgggccagctctcctgcctgtgtctagaggaagccagagacagaaataggctaagcctgcagtaggatctcagccacaagggccccgcaggatggagctgggtcaaggaccagggagccctgactcccagaggctgccaccggggagaagcagcggtcctccatccagaacctaagggctgaagcaaaggctgccaggacccttgaagatgcttttggctcacctcatttcaccccacgctctgctggctggcagaggagaaggcagtcgtttcctctctgaagagtatttttttcgattgccctctggttagggtgcacatataaatcagagttaatatatgaacgcgtgtgcatgcacaagtgtgtgtgtgcctgcgtgctgtgcgtggcagggtgtgtgtgtgtgtgtctggctgtgcgttccggagtgtgtgacgatgctgacctagctgtgtggccttgggcttgctgcttcattactcacctggatggggacgagggatgagaagggtgtgggtttggccccatgtcactggccggaaggatgtgtctcagccctgccctgtggggtgcccccgatgggaggctgtcccatctcccagtccccatctctttttccccacactgtccctggccaagccctgcccagagctgaaccctgtagctgcccccttgccctgtgtgggattcgcagtgtctcatttggtgacgtcttactggtgatcatctcctcaccccatctcccaccttgtggaataaatacatgttagcacttcccagagcagcctcctttgtgtcttgatttctccagaactggaggtggggaggggagtgatggagacataggaggagagcttctttggctttgagggtttagtgttacttatttatctatttattcgagatggggtcttgctctgtggcccaggctggagtgcagtggtgcaatcatga

SEQ ID NO: 42 - protein, 468 aa, Homo sapiens
MKRRSGTPTTLCKELKYSKDPPQISIIFIFVNEALSVILRSVHSAVNHTPTHLLKEIILVDDNSDEEELKVPLEEYVHKRYPGLVKVVRNQKREGLIRARIEGWKVATGQVTGFFDAHVEFTAGWAEPVLSRIQENRKRVILPSIDNIKQDNFEVQRYENSAHGYSWELWCMYISPPKDWWDAGDPSLPIRTPAMIGCSFVVNRKFFGEIGLLDPGMDVYGGENIELGIKVWLCGGSMEVLPCSRVAHIERKKKPYNSNIGFYTKRNALRVAEVWMDDYKSHVYIAWNLPLENPGIDIGDVSERRALRKSLKCKNFQWYLDHVYPEMRRYNNTVAYGELRNNKAKDVCLDQGPLENHTAILYPCHGWGPQLARYTKEGFLHLGALGTTTLLPDTRCLVDNSKSRLPQLLDCDKVKSSLYKRWNFIQNGAIMNKGTGRCLEVENRGLAGIDLILRSCTGQRWTIKNSIK

SEQ ID NO: 43 - DNA, 580 bp, Homo sapiens
  CDS (2)..(580)
caccagatcttccatcatattcatcttcgtgaacgaggccctgtcggtgatcctgcggtccgtgcacagtgccgtcaatcacacgcccacacacctgctgaaggaaatcattctggtggatgacaacagcgacgaagaggagctgaaggtccccctagaggagtatgtccacaaacgctaccccgggctggtgaaggtggtaagaaatcagaagagggaaggcctgatccgcgctcgcattgagggctggaaggtggctaccgggcaggtcactggcttctttgatgcccacgtggaattcaccgctggctgggctgagccggttctatcccgcatccaggaaaaccggaagcgtgtgatcctcccctccattgacaacatcaaacaggacaactttgaggtgcagcggtacgagaactcggcccacgggtacagctgggagctgtggtgcatgtacatcagccccccaaaagactggtgggacgccggagacccttctctccccatcaggaccccagccatgataggctgctcgttcgtggtcaacaggaagttcttcggtgaaattggtctcgagggc

SEQ ID NO: 44 - protein, 193 aa, Homo sapiens
TRSSIIFIFVNEALSVILRSVHSAVNHTPTHLLKEIILVDDNSDEEELKVPLEEYVHKRYPGLVKVVRNQKREGLIRARIEGWKVATGQVTGFFDAHVEFTAGWAEPVLSRIQENRKRVILPSIDNIKQDNFEVQRYENSAHGYSWELWCMYISPPKDWWDAGDPSLPIRTPAMIGCSFVVNRKFFGEIGLEG

SEQ ID NO: 45 - DNA, 495 bp, Homo sapiens
  CDS (2)..(493)
caccagatcttccatcatattcatcttcgtgaacgaggccctgtcggtgatcctgcggtccgtgcacagtgccgtcaatcacacgcccacacacctgctgaaggaaatcattctggtggatgacaacagcgacgaagaggagctgaaggtccccctagaggagtatgtccacaaacgctaccccgggctggtgaaggtggtaagaaatcagaagagggaaggcctgatccgcgctcgcattgagggctggaaggtggctaccgggcaggtcactggcttctttgatgcccacgtggaattcaccgctggctgggctgagccggttctatcccgcatccaggaaaaccggaagcgtgtgatcctcccctccattgacaacatcaaacaggacaactttgaggtgcagcggaccccagccatgataggctgctcgttcgtggtcaacaggaagttcttcggtgaaattggtctcgagggcaagggcgaattccagca

SEQ ID NO: 46 - protein, 164 aa, Homo sapiens
TRSSIIFIFVNEALSVILRSVHSAVNHTPTHLLKEIILVDDNSDEEELKVPLEEYVHKRYPGLVKVVRNQKREGLIRARIEGWKVATGQVTGFFDAHVEFTAGWAEPVLSRIQENRKRVILPSIDNIKQDNFEVQRTPAMIGCSFVVNRKFFGEIGLEGKGEFQ

SEQ ID NO: 47 - DNA, 2422 bp, Homo sapiens
  CDS (381)..(2201)
cgccaaggcagccggcgctggcgatgggaagcggcgtggccgccgacacaggcagtggcaaagtttcccagacgtacacatctggacgcgcggctgccggctacccgtgacccctctaggaagggttcagggatttttaatttggaaaaaaatccacctggtttcctttgtcaaggtctctccgggtggccagcggcaggagctgcaaacttgggcacggcggctacaccggcagcggaccgggctttggagaacctcgggactcaggtgctgaggtgcccagcggctccggacgtgctacggggtgcgagcgcgggggagttcggggcgcacgacaaggaagggcccccgggagctctatatggaggaaggagcccagaatggtgtgcaccaggaagaccaaaactttggtgtccacttgcgtgatcctgagcggcatgactaacatcatctgcctgctctacgtgggctgggtcaccaactacatcgccagcgtgtatgtgcgggggcaggagccggcgcccgacaagaagctggaggaagacaaaggggacactctgaagattattgagcggctggaccacctggagaatgtcatcaagcagcacattcaagaggctcctgccaagcctgaggaggcagaggccgagcccttcacagactcctctctgtttgcacactggggccaggagctcagccccgaaggccggcgcgtggccctgaagcaattccagtactacggctacaacgcctacctcagcgaccgcctgcccctggaccggcccctgcctgacctcagacccagtgggtgccgtaacctctcatttcctgacagcctgccagaggtgagcatcgtgttcatcttcgtcaatgaagcgctttcagtgctgctgcgctccatccactcggccatggaacgcacgcccccacatctgctcaaggagatcattctggtggatgacaacagcagtaacgaggaactgaaggagaagctgaccgaatatgtggacaaggtgaacagccagaagccaggcttcatcaaagtcgtgcgtcacagcaagcaggaaggcctcatccgctccagggtcagtggctggagggcggccactgcccctgtggtggcactctttgatgcccacgtggagttcaatgtgggctgggctgaacctgtactcacccgcatcaaggagaaccggaagcggatcatctcgccatcctttgataacatcaaatatgacaactttgagatagaagagtacccgctggctgcccagggctttgactgggagctgtggtgccgctacctaaatccccccaaggcctggtggaagctggagaactccacagcgccaatcaggagccctgccctcattggctgcttcattgtggaccggcagtacttccaggagatcggcctgctggacgaaggcatggaagtctacgggggcgagaatgtggagcttgggatcagggtgtggcagtgtggcgggagtgtggaggtcctgccctgctcacggattgcccacattgagcgagcccacaagccctacacagaggacctcaccgcccatgtccgcaggaacgctctcagggtggctgaagtctggatggatgaatttaaaagccacgtctacatggcatggaacataccgcaggaggactcaggaattgacatgggggacatcacggcaaggaaggctctcaggaaacagctgcagtgcaagaccttccggtggtacctggtcagcgtgtacccagagatgaggatgtactccgacatcattgcctatggagtgctgcagaattctctgaagactgatttgtgtcttgaccaggggccagatacagagaatgtccccatcatgtacatctgccatgggatgacgcctcagaacgtgtactacacgagcagtcagcagatccatgtgggcattctgagccccaccgtggatgatgatgacaaccgatgcctggtggacgtcaacagccggccccggctcatcgaatgcagctacgccaaagccaagaggatgaagctgcactggcagttctctcagggaggacccatccagaaccgcaagtccaagcgctgtctgaagctgcaggagaatagcgacctggagttcggcttccagctggtgttgcagaagtgctcgggccagcaagggagcatcaccaacgtcctgaggagcctcgcgtcctgacccaccggggccacttccgtgctgcctctttgctactgtgtagcacctgctgcaacattgcctgctgtccacgtggggttgtttggagtctggggaaccaggttagtgggcccccaagaagagctttttatttcctattcaattttcatggagtttatagaaagatgctgattggtaggtgatggtatgatatcaaactattttgcagttgtaaatag

SEQ ID NO: 48 - protein, 607 aa, Homo sapiens
MVCTRKTKTLVSTCVILSGMTNIICLLYVGWVTNYIASVYVRGQEPAPDKKLEEDKGDTLKIIERLDHLENVIKQHIQEAPAKPEEAEAEPFTDSSLFAHWGQELSPEGRRVALKQFQYYGYNAYLSDRLPLDRPLPDLRPSGCRNLSFPDSLPEVSIVFIFVNEALSVLLRSIHSAMERTPPHLLKEIILVDDNSSNEELKEKLTEYVDKVNSQKPGFIKVVRHSKQEGLIRSRVSGWRAATAPVVALFDAHVEFNVGWAEPVLTRIKENRKRIISPSFDNIKYDNFEIEEYPLAAQGFDWELWCRYLNPPKAWWKLENSTAPIRSPALIGCFIVDRQYFQEIGLLDEGMEVYGGENVELGIRVWQCGGSVEVLPCSRIAHIERAHKPYTEDLTAHVRRNALRVAEVWMDEFKSHVYMAWNIPQEDSGIDMGDITARKALRKQLQCKTFRWYLVSVYPEMRMYSDIIAYGVLQNSLKTDLCLDQGPDTENVPIMYICHGMTPQNVYYTSSQQIHVGILSPTVDDDDNRCLVDVNSRPRLIECSYAKAKRMKLHWQFSQGGPIQNRKSKRCLKLQENSDLEFGFQLVLQKCSGQQGSITNVLRSLAS

SEQ ID NO: 49 - DNA, 2422 bp, Homo sapiens; identical to SEQ ID NO: 47
  CDS (381)..(2201)

SEQ ID NO: 50 - protein, 607 aa, Homo sapiens; identical to SEQ ID NO: 48

SEQ ID NO: 51 - DNA, 2422 bp, Homo sapiens; identical to SEQ ID NO: 47
  CDS (381)..(2201)

SEQ ID NO: 52 - protein, 607 aa, Homo sapiens; identical to SEQ ID NO: 48

SEQ ID NO: 53 - DNA, 1132 bp, Homo sapiens
  CDS (4)..(1110)
gttatgaagtgcaaggctgcagttgcttgggaggctggaaagcctctctccatagaggagatagaggtggcacccccaaaggctcatgaagttcgaatcaagatcattgccactgcggtttgccacaccgacgcctataccctgaggggagctgatcctgagggttgttttccagtgatcttgggacatgaaggtgccggaattgaggaaagtgttggcgagggagttactaagctgaaggcgggtgacactgtcatcccactttacatcccacagtgtggagaatgcaaattttgtctatatcctaaaactaacctttgccagaagataagagtcactcaagggaaaggattaatgccagatggtaccagcagatttacttgcaaaggaaagacaattttgcgttacatgggaaccagcacattttctgaatacacagttgtagctgatatctctgttgctaaaatagatcctttagcacctttggataaactctgccttctaggttgtggcatttcagctggtgatggtgctgctgtgaacactgccaaggtggaacctggctctgtttgtgccgtctttggtctgggaggagttggattggcagttatcaagggctgtaaagtggctggtgcatcccggatcattggtgtggacatcaataaagataaatttgcaagggccaaagagtttggagccactgaatgtattaaccctcagggttttagtaaacccatccaggaagggctcattgagacgactgatggaggagtggactattcctttgaatgtattggtaatgtgaaggtcatgagagcagcacttgaggcttatcacaagggctggggagtcagcgtggtggttggagtagctgcttcaggtgaagaaattgccactcgtccattccagctggtaacaggtcgcacatggaaaggaactgcctttggaggatggaagagtgtagaaagtgtcccaaagttggtgtctgaatatatgtccaaaaaaataaaagttgatgaatttgtgactcacaatctgtcttttggtgaaattaacaaagcctttcaactgatgcattctggaaagagcattcgaactgttgtaaagatttaattcaaaagagaaaaataat

SEQ ID NO: 54 - protein, 369 aa, Homo sapiens [sequence omitted]

SEQ ID NO: 55 - DNA, 701 bp, Homo sapiens
  CDS (8)..(697)
gcggtgtatgtgcggcaataacatgtcaaccccgctgcccaccatcgtgcccgccccccggaaggccaccactgaggtgattttcctgcatggattgggagatactgggcacggatgggcagaagcctttgccggtatcataagttcacatatcaaatatatctgcccgcatgcgcctgttaggcctgttacattaaatatgaacatagctatgccttcatggtttgatattattgggctttcaccagattcacaggaggatgaatctgggattaaacaggcagcacaaaatataaaagctttgattgatcaagaagtgaagaatggcattccttctaacagaattattttgggagggttttctcagggaggagctttatctttatatactgcccttaccacgcaccagaaactggcaggtgtcactgcactcaattgctggcttccactttgggcttcctttccacagggtcctatcggtggtgctaatagagatatttctattctccagtgccacggggattgtgaccctttggttcccctgatgtttggttctcttacggttgaaaaactaaaaacattggtgaatccagccaatgtgacctttaaaacctatgaaggtatgatgcacagttcgtgtcaacaggaaatgatgaatgtcaagcaattcattgataaactcctacctccaattgattgac

SEQ ID NO: 56 - protein, 230 aa, Homo sapiens
MCGNNMSTPLPTIVPAPRKATTEVIFLHGLGDTGHGWAEAFAGIISSHIKYICPHAPVRPVTLNMNIAMPSWFDIIGLSPDSQEDESGIKQAAQNIKALIDQEVKNGIPSNRIILGGFSQGGALSLYTALTTHQKLAGVTALNCWLPLWASFPQGPIGGANRDISILQCHGDCDPLVPLMFGSLTVEKLKTLVNPANVTFKTYEGMMHSSCQQEMMNVKQFIDKLLPPID

SEQ ID NO: 57 - DNA, 2475 bp, Homo sapiens
  CDS (98)..(1828)
actcactatagggctcgagcggagctgctggctggagaggagggtggacgaagctctctctagaaagacatcctgagaggacttggcaggcctgaatatgcattggctgcgaaaagttcagggactttgcaccctgtggggtactcagatgtccagccgcactctctacattaatagtaggcaactggtgtccctgcagtggggccaccaggaagtgccggccaagtttaactttgctagtgatgtgttggatcactgggctgacatggagaaggctggcaagcgactcccaagcccagccctgtggtgggtgaatgggaaggggaaggaattaatgtggaatttcagagaactgagtgaaaacagccagcaggcagccaacgtcctctcgggagcctgtggcctgcagcgtggggatcgtgtggcagtggtgctgccccgagtgcctgagtggtggctggtgatcctgggctgcattcgagcaggtctcatctttatgcctggaaccatccagatgaaatccactgacatactgtataggttgcagatgtctaaggccaaggctattgttgctggggatgaagtcatccaagaagtggacacagtggcatctgaatgtccttctctgagaattaagctactggtgtctgagaaaagctgtgatgggtggctgaacttcaagaaactactaaatgaggcatccaccactcatcactgtgtggagactggaagccaggaagcatctgccatctacttcactagtgggaccagtggtcttcccaagatggcagaacattcctactcgagcctgggcctcaaggccaagatggatgctggttggacaggcctgcaagcctctgatataatgtggaccatatcagacacaggttggatactgaacatcttgggctcacttttggaatcttggacattaggagcatgcacatttgttcatctcttgccaaagtttgacccactggttattctaaagacactctccagttatccaatcaagagtatgatgggtgcccctattgtttaccggatgttgctacagcaggatctttccagttacaagttcccccatctacagaactgcctcgctggaggggagtcccttcttccagaaactctggagaactggagggcccagacaggactggacatccgagaattctatggccagacagaaacgggattaacttgcatggtttccaagacaatgaaaatcaaaccaggatacatgggaacggctgcttcctgttatgatgtacaggttatagatgataagggcaacgtcctgccccccggcacagaaggagacattggcatcagggtcaaacccatcaggcctataggcatcttctctggctatgtggaaaatcccgacaagacagcagccaacattcgaggagacttttggctccttggagaccggggaatcaaagatgaagatgggtatttccagtttatgggacgggcagatgatatcattaactccagcgggtaccggattggaccctcggaggtagagaatgcactgatgaagcaccctgctgtggttgagacggctgtgatcagcagcccagaccccgtccgaggagaggtggtgaaggcatttgtgatactggcctcgcagttcctatcccatgacccagaacagctcaccaaggagctgcagcagcatgtgaagtcagtgacagccccatacaagtacccaagaaagatagagtttgtcttgaacctgcccaagactgtcacagggaaaattcaacgaaccaaacttcgagacaaggagtggaagatgtccggaaaagcccgtgcgcagtgagacatctaggagacattcatttggattcccctcttctttctctttcttttccctttgggcccttggccttactatgatgatatgagattctttatgaaagaacatgaatgtaagtttgtcttgccctggttattagccttggttattagcacaaaactttaccatgttagatgttgaaagaagaaagggaaggaatgagagagagtgaaaaggagagggtaacagaaaaaaaggaaagaaaagtaagtcagggaaatattaaaaactgcaagggaaagcaattgaaaaagaaataaagtagggaaagaaggagagaggaagcaagggaaggaggaagaaaggaaagaggagatgaaagggggagaaaagatagaagaaaaataattgaagggagaatcagaaaaataaagagaagaaaggaaagaaataaagagagaaagagaaagaagaaagagcaaaagaacacaagaaagaaagagagggagaaagagagggagaaagggagagaaaaaaattgtaaaaataaaaatagtaaaagaaactgataacgaaaagtaatggaagacaggaagaaaagatagaagaaaaataattgaagggagaatcagaaaaataaagagaagaaaggaaagaaataaagagag

SEQ ID NO: 58 - protein, 577 aa, Homo sapiens
MHWLRKVQGLCTLWGTQMSSRTLYINSRQLVSLQWGHQEVPAKFNFASDVLDHWADMEKAGKRLPSPALWWVNGKGKELMWNFRELSENSQQAANVLSGACGLQRGDRVAVVLPRVPEWWLVILGCIRAGLIFMPGTIQMKSTDILYRLQMSKAKAIVAGDEVIQEVDTVASECPSLRIKLLVSEKSCDGWLNFKKLLNEASTTHHCVETGSQEASAIYFTSGTSGLPKMAEHSYSSLGLKAKMDAGWTGLQASDIMWTISDTGWILNILGSLLESWTLGACTFVHLLPKFDPLVILKTLSSYPIKSMMGAPIVYRMLLQQDLSSYKFPHLQNCLAGGESLLPETLENWRAQTGLDIREFYGQTETGLTCMVSKTMKIKPGYMGTAASCYDVQVIDDKGNVLPPGTEGDIGIRVKPIRPIGIFSGYVENPDKTAANIRGDFWLLGDRGIKDEDGYFQFMGRADDIINSSGYRIGPSEVENALMKHPAVVETAVISSPDPVRGEVVKAFVILASQFLSHDPEQLTKELQQHVKSVTAPYKYPRKIEFVLNLPKTVTGKIQRTKLRDKEWKMSGKARAQ

SEQ ID NO: 59 - DNA, 1878 bp, Homo sapiens
  CDS (58)..(1788)
agggtggacgaagctctctctagaaagacatcctgagaggacttggcaggcctgaacatgcattggctgcgaaaagttcagggactttgcaccctgtggggtactcagatgtccagccgcactctctacattaatagtaggcaactggtgtccctgcagtggggccaccaggaagttccggccaagtttaactttgctagtgatgtgttggatcactgggctgacatggagaaggctggcaagcgactcccaagcccagccctgtggtgggtgaatgggaaggggaaggaattaatgtggaatttcagagaactgagtgaaaacagccggcaggcagccaacgtcctctcgggagcctgtggcctgcagcgtggggatcgtgtggcagtgatgctgccccgagtgcctgagtggtggctggtgatcctgggctgcattcgagcaggtctcatctttatgcctggaaccatccagatgaaatccactgacatactgtataggttgcagatgtctaaggccaaggctattgttgctggggatgaagtcatccaagaagtggacacagtggcatctgaatgtccttctctgagaattaagctactggtgtctgagaaaagctgcgatgggtggctgaacttcaagaaactactaaatgaggcatccaccactcatcactgtgtggagactggaagccaggaagcatctgccatctacttcactagtgggaccagtggtcttcccaagatggcagaacattcctactcgagcctgggcctcaaggccaagatggatgctggttggacaggcctgcaagcctctgatataatgtggaccatatcagacacaggttggatactgaacatcttgggctcacttttggaatcttggacattaggagcatgcacatttgttcatctcttgccaaagtttgacccactggttattctaaagacactctccagttatccaatcaagagtatgatgggtgcccctattgtttaccggatgttgctacagcaggatctttccagttacaagttcccccatctacagaactgcctcgctggaggggagtcccttcttccagaaactctggagaactggagggcccagacaggactggacatccgagaattctatggccagacagaaacgggattaacttgcatggtttccaagacaatgaaaatcaaaccaggatacatgggaacggctgcttcctgttatgatgtacaggttatagatgataagggcaacgtcctgccccccggcacagaaggagacattggcatcagggtcaaacccatcaggcctataggcatcttctctggctatgtggaaaatcccgacaagacagcagccaacattcgaggagacttttggctccttggagaccggggaatcaaagatgaagatgggtatttccagtttatgggacgggcagatgatatcattaactccagcgggtaccggattggaccctcggaggtagagaatgcactgatgaagcaccctgctgtggttgagacggctgtgatcagcagcccagaccccgtccgaggagaggtggtgaaggcatttgtgatactggcctcgcagttcctatcccatgacccagaacagctcaccaaggagctgcagcagcatgtgaagtcagtgacagccccatacaagtacccaagaaagatagagtttgtcttgaacctgcccaagactgtcacagggaaaattcaacgaaccaaacttcgagacaaggagtggaagatgtccggaaaagcccgtgcgcagtgaggcgtctaggagacattcatttggattcccctcttctttctctttcttttccctttgggcccttagccttactatgatgatatgaga

SEQ ID NO: 60 - protein, 577 aa, Homo sapiens
MHWLRKVQGLCTLWGTQMSSRTLYINSRQLVSLQWGHQEVPAKFNFASDVLDHWADMEKAGKRLPSPALWWVNGKGKELMWNFRELSENSRQAANVLSGACGLQRGDRVAVMLPRVPEWWLVILGCIRAGLIFMPGTIQMKSTDILYRLQMSKAKAIVAGDEVIQEVDTVASECPSLRIKLLVSEKSCDGWLNFKKLLNEASTTHHCVETGSQEASAIYFTSGTSGLPKMAEHSYSSLGLKAKMDAGWTGLQASDIMWTISDTGWILNILGSLLESWTLGACTFVHLLPKFDPLVILKTLSSYPIKSMMGAPIVYRMLLQQDLSSYKFPHLQNCLAGGESLLPETLENWRAQTGLDIREFYGQTETGLTCMVSKTMKIKPGYMGTAASCYDVQVIDDKGNVLPPGTEGDIGIRVKPIRPIGIFSGYVENPDKTAANIRGDFWLLGDRGIKDEDGYFQFMGRADDIINSSGYRIGPSEVENALMKHPAVVETAVISSPDPVRGEVVKAFVILASQFLSHDPEQLTKELQQHVKSVTAPYKYPRKIEFVLNLPKTVTGKIQRTKLRDKEWKMSGKARAQ

SEQ ID NO: 61 - DNA, 3162 bp, Homo sapiens
  CDS (80)..(3097)
  misc_feature (5)..(5): Wherein n may be a, c, g or t
gaatntcgcccttacacgtagaggagagaaaagcgaccaagataaaagtggacagaagaataagcgagactttttatccatgaaacagtctcctgccctcgctccggaagagcgctgccgcagagccgggtccccaaagccggtcttgagagctgatgacaataacatgggcaatggctgctctcagaagctggcgactgctaacctcctccggttcctattgctggtcctgattccatgtatctgtgctctcgttctcttgctggtgatcctgctttcctatgttggaacattacaaaaggtctattttaaatcaaatgggagtgaacctttggtcactgatggtgaaatccaagggtccgatgttattcttacaaatacaatttataaccagagcactgtggtgtctactgcacatcccgaccaacacgttccagcctggactacggatgcttctctcccaggggaccaaagtcacaggaatacaagtgcctgtatgaacatcacccacagccagtgtcagatgctgccctaccacgccacgctgacacctctcctctcagttgtcagaaacatggaaatggaaaagttcctcaagtttttcacatatctccatcgcctcagttgctatcaacatatcatgctgtttggctgtaccctcgccttccctgagtgcatcattgatggcgatgacagtcatggactcctgccctgtaggtccttctgtgaggctgcaaaagaaggctgtgaatcagtcctggggatggtgaattactcctggccggatttcctcagatgctcccagtttagaaaccaaactgaaagcagcaatgtcagcagaatttgcttctcacctcagcaggaaaacggaaagcaattgctctgtggaaggggtgagaactttctgtgtgccagtggaatctgcatccccgggaaactgcaatgtaatggctacaacgactgtgacgactggagtgacgaggctcattgcaactgcagcgagaatctgtttcactgtcacacaggcaagtgccttaattacagccttgtgtgtgatggatatgatgactgtggggatttgagtgatgagcaaaactgtgattgcaatcccacaacagagcatcgctgcggggacgggcgctgcatcgccatggagtgggtgtgtgatggtgaccacgactgtgtggataagtccgacgaggtcaactgctcctgtcacagccagggtctggtggaatgcagaaatggacaatgtatccccagcacgtttcaatgtgatggtgacgaggactgcaaggatgggagtgatgaggagaactgcagcgtcattcagacttcatgtcaagaaggagaccaaagatgcctctacaatccctgccttgattcatgtggtggtagctctctctgtgacccgaacaacagtctgaataactgtagtcaatgtgaaccaattacattggaactctgcatgaatttgccctacaacagtacaagttatccaaattattttggccacaggactcaaaaggaagcatccatcagctgggagtcttctcttttccctgcacttgttcaaaccaactgttataaatacctcatgttcttttcttgcaccattttggtaccaaaatgtgatgtgaatacaggcgagcatatccctccttgcagggcattgtgtgaacactctaaagaacgctgtgagtctgttcttgggattgtgggcctacagtggcctgaagacacagattgcagtcaatttccagaggaaaattcagacaatcaaacctgcctgatgcctgatgaatatgtggaaggttgtaaagagagagatctttgggaatgtccatccaataaacaatgtttgaagcacacagtgatctgcgatgggttcccagactgccctgattacatggacgagaaaaactgctcattttgccaagatgatgagctggaatgtgcaaaccatgcgtgtgtgtcacgtgacctgtggtgtgatggtgaagccgactgctcagacagttcagatgaatgggactgtgtgaccctctctataaatgtgaactcctcttcctttctgatggttcacagagctgccacagaacaccatgtgtgtgcagatggctggcaggagatattgagtcagctggcctgcaagcagatgggtttaggagaaccatctgtgaccaaattgatacaggaacaggagaaagagccgcggtggctgacattacactccaactgggagagcctcaatgggaccactttacatgaacttctagtaaatgggcagtcttgtgagagcagaagtaaaatttctcttctgtgtactaaacaagactgtgggcgccgccctgctgcccgaatgaacaaaaggatccttggaggtcggacgagtcgccctggaaggtggccatggcagtgttctctgcagagtgaacccagtggacatatctgtggctgtgtcctcattgccaagaagtgggttctgacagttgcccactgcttcgaggggagagagaatgctgcagtttggaaagtggtgcttggcatcaacaatctagaccatccatcagtgttcatgcagacacgctttgtgaagaccatcatcctgcatccccgctacagtcgagcagtggtggactatgacatcagcatcgttgggctgagtgaagacatcagtgagactggctacgtccggcctgtctgcttgcccaacccggagcagtggctagagcctgacacgtactgctatatcacaggctggggccacatgggcaataaaatgccatttaagctgcaagagggagaggtccgcattatttctctggaacattgtcagtcctactttgacatgaagaccatcaccactcggatgatatgtgctggctatgagtctggcacagttgattcatgcatgggtgacagcggtgggcctcttgtttgtgagaagcctggaggacggtggacattatttggattaacttcatggggctccgtctgcttttccaaagtcctggggcctggcgtttatagtaatgtgtcatatttcgtcgaatggattaaaagacagatttacatccagacctttctcctaaactaattataaggatgatcagagacttttgccagctacactaaaagaaaatggccttcttgactgtg

SEQ ID NO: 62 - protein, 1006 aa, Homo sapiens
MKQSPALAPEERCRRAGSPKPVLRADDNNMGNGCSQKLATANLLRFLLLVLIPCICALVLLLVILLSYVGTLQKVYFKSNGSEPLVTDGEIQGSDVILTNTIYNQSTVVSTAHPDQHVPAWTTDASLPGDQSHRNTSACMNITHSQCQMLPYHATLTPLLSVVRNMEMEKFLKFFTYLHRLSCYQHIMLFGCTLAFPECIIDGDDSHGLLPCRSFCEAAKEGCESVLGMVNYSWPDFLRCSQFRNQTESSNVSRICFSPQQENGKQLLCGRGENFLCASGICIPGKLQCNGYNDCDDWSDEAHCNCSENLFHCHTGKCLNYSLVCDGYDDCGDLSDEQNCDCNPTTEHRCGDGRCIAMEWVCDGDHDCVDKSDEVNCSCHSQGLVECRNGQCIPSTFQCDGDEDCKDGSDEENCSVIQTSCQEGDQRCLYNPCLDSCGGSSLCDPNNSLNNCSQCEPITLELCMNLPYNSTSYPNYFGHRTQKEASISWESSLFPALVQTNCYKYLMFFSCTILVPKCDVNTGEHIPPCRALCEHSKERCESVLGIVGLQWPEDTDCSQFPEENSDNQTCLMPDEYVEGCKERDLWECPSNKQCLKHTVICDGFPDCPDYMDEKNCSFCQDDELECANHACVSRDLWCDGEADCSDSSDEWDCVTLSINVNSSSFLMVHRAATEHHVCADGWQEILSQLACKQMGLGEPSVTKLIQEQEKEPRWLTLHSNWESLNGTTLHELLVNGQSCESRSKISLLCTKQDCGRRPAARMNKRILGGRTSRPGRWPWQCSLQSEPSGHICGCVLIAKKWVLTVAHCFEGRENAAVWKVVLGINNLDHPSVFMQTRFVKTIILHPRYSRAVVDYDISIVGLSEDISETGYVRPVCLPNPEQWLEPDTYCYITGWGHMGNKMPFKLQEGEVRIISLEHCQSYFDMKTITTRMICAGYESGTVDSCMGDSGGPLVCEKPGGRWTLFGLTSWGSVCFSKVLGPGVYSNVSYFVEWIKRQIYIQTFLLN

SEQ ID NO: 63 - DNA, 4840 bp, Homo sapiens
  CDS (61)..(4596)
cgctctccccgccccctccctccctcgcaggggccgagcgaatgtagcccgcgagagaaaatggcggcggcggcggggaatcgcgcctcgtcgtcgggattcccgggcgccagggctacgagccctgagcagcgcggcggagaggccctcaaggcgagcagcgcgcccgcggctgccgcgggactgctgcgggaggcgggcagcggggtgcctggcgagcgggcggactggcggcggcggcagctgcgcaaagtgcggagtgtggagctggaccagctgcctgagcagccgctcttccttgccgcctcaccgccggcctcctcgacttccccgtcgccggagcccgcggacgcagcggggagtgggaccggcttccagcctgtggcggtgccgccgccccacggagccgccagccgcggcggcgcccaccttaccgagtcggtggcggcgccggacagcggcgcctcgagtcccgcagcggccgagcccggggagaagcgggcgcccgccgccgagccgtctcctgcagcggcccccgccggtcgtgagatggagaataaagaaactctcaaagggttgcacaagatggatgatcgtccagaggaacgaatgatcagggagaaactgaaggcaacctgtatgccagcctggaagcacgaatggttggaaaggagaaataggcgagggcctgtggtggtaaaaccaatcccagttaaaggagatggatctgaaatgaatcacttagcagctgagtctccaggagaggtccaggcaagtgcggcttcaccagcttccaaaggccgacgcagtccttctcctggcaactccccatcaggtcgcacagtgaaatcagaatctccaggagtaaggagaaaaagagtttccccagtgccttttcagagtggcagaatcacaccaccccgaagagccccttcaccagatggcttctcaccatatagccctgaggaaacaaaccgccgtgttaacaaagtgatgcgggccagactgtacttactgcagcagatagggcctaactctttcctgattggaggagacagcccagacaataaataccgggtgtttattgggcctcagaactgcagctgtgcacgtggaacattctgtattcatctgctatttgtgatgctccgggtgtttcaactagaaccttcagacccaatgttatggagaaaaactttaaagaattttgaggttgagagtttgttccagaaatatcacagtaggcgtagctcaaggatcaaagctccatctcgtaacaccatccagaagtttgtttcacgcatgtcaaattctcatacattgtcatcatctagtacttctacatctagttcagaaaacagcataaaggatgaagaggaacagatgtgtcctatttgcttgttgggcatgcttgatgaagaaagtcttacagtgtgtgaagacggctgcaggaacaagctgcaccaccactgcatgtcaatttgggcagaagagtgtagaagaaatagagaacctttaatatgtcccctttgtagatctaagtggagatctcatgatttctacagccacgagttgtcaagtcctgtggattccccttcttccctcagagctgcacagcagcaaaccgtacagcagcagcctttggctggatcacgaaggaatcaagagagcaattttaaccttactcattatggaactcagcaaatccctcctgcttacaaagatttagctgagccatggattcaggtgtttggaatggaactcgttggctgcttattttctagaaactggaatgtgagagagatggccctcaggcgtctttcccatgatgtcagtggggccctgctgttggcaaatggggagagcactggaaattctgggggcagcagtggaagcagcccgagtgggggagccaccagtgggtcttcccagaccagtatctcaggagatgtggtggaggcatgctgcagcgttctgtcaatggtctgtgctgaccctgtctacaaagtgtacgttgctgctttaaaaacattgagagccatgctggtatatactccttgccacagtttagcggaaagaatcaaacttcagagacttctccagccagttgtagacaccatcctagtcaaatgtgcagatgccaatagccgcacaagtcagctgtccatatcaacactgttggaactgtgcaaaggccaagcaggagagttggcagttggcagagaaatactaaaagctggatccattggtattggtggtgttgattatgtcttaaattgtattcttggaaaccaaactgaatcaaacaattggcaagaacttcttggccgcctttgtcttatagatagactgttgttggaatttcctgctgaattttatcctcatattgtcagtactgatgtttcacaagctgagcctgttgaaatcaggtataagaagctgctgtccctcttaacctttgctttgcagtccattgataattcccactcaatggttggcaaactttccagaaggatctacttgagttctgcaagaatggttactacagtaccccatgtgttttcaaaactgttagaaatgctgagtgtttccagttccactcacttcaccaggatgcgtcgccgtttgatggctattgcagatgaggtggaaattgccgaagccatccagttgggcgtagaagacactttggatggtcaacaggacagcttcttgcaggcatctgttcccaacaactatctggaaaccacagagaacagttcccctgagtgcacagtccatttagagaaaactggaaaaggattatgtgctacaaaattgagtgccagttcagaggacatttctgagagactggccaggatttcagtaggaccttctagttcaacaacaacaacaacaacaacaacagagcaaccaaagccaatggttcaaacaaaaggcagaccccacagtcagtgtttgaactcctctcctttatctcatcattcccaattaatgtttccagccttgtcaaccccttcttcttctaccccatctgtaccagctggcactgcaacagatgtctctaagcatagacttcagggattcattccctgcagaataccttctgcatctcctcaaacacagcgcaagttttctctacaattccacagaaactgtcctgaaaacaaagactcagataaactttccccagtctttactcagtcaagacccttgccctccagtaacatacacaggccaaagccatctcgacctaccccaggtaatacaagtaaacagggagatccctcaaaaaatagcatgacacttgatctgaacagtagttccaaatgtgatgacagctttggctgtagcagcaatagtagtaatgctgttatacccagtgacgagacagtgttcaccccagtagaggagaaatgcagattagatgtcaatacagagctcaactccagtattgaggaccttcttgaagcatctatgccttcaagtgatacaacagtaacttttaagtcagaagttgctgtcctgtctcctgaaaaggctgaaaatgatgatacctacaaagatgatgtgaatcataatcaaaagtgcaaagagaagatggaagctgaagaagaagaagctttagcaattgccatggcaatgtcagcgtctcaggatgccctccccatagttcctcagctgcaggttgaaaatggagaagatatcatcattattcaacaggatacaccagagactctaccaggacataccaaagcaaaacaaccgtatagagaagacactgaatggctgaaaggtcaacagataggccttggagcattttcttcttgttatcaggctcaagatgtgggaactggaactttaatggctgttaaacaggtgacttatgtcagaaacacatcttctgagcaagaagaagtagtagaagcactaagagaagagataagaatgatgagccatctgaatcatccaaacatcattaggatgttgggagccacgtgtgagaagagcaattacaatctcttcattgaatggatggcagggggatcggtggctcatttgctgagtaaatatggagccttcaaagaatcagtagttattaactacactgaacagttactccgtggcctttcgtatctccatgaaaaccaaatcattcacagagatgtcaaaggtgccaatttgctaattgacagcactggtcagagactaagaattgcagattttggagctgcagccaggttggcatcaaaaggaactggtgcaggagagtttcagggacaattactggggacaattgcatttatggcacctgaggtactaagaggtcaacagtatggaaggagctgtgatgtatggagtgttggctgtgctattatagaaatggcttgtgcaaaaccaccatggaatgcagaaaaacactccaatcatcttgctttgatatttaagattgctagtgcaactactgctccatcgatcccttcacatttgtctcctggtttacgagatgtggctcttcgttgtttagaacttcaacctcaggacagacctccatcaagagagctactgaagcatccagtctttcgtactacatggtagccaattatgcagatcaactacagtagaaacaggatgctcaacaagagaaaaaaaacttgtggggaaccacattgatattctactggccatgatgccactgaacagctatgaacgaggccagtggggaacccttacctaagtatgtgattgacaaatcatgatctgtacctaagctcagtatgcaaaagcccaaactagtgcagaaactgtaaactgtgcctttcaaagaactggccctagg

SEQ ID NO: 64 - protein, 1512 aa, Homo sapiens
MAAAAGNRASSSGFPGARATSPEQRGGEALKASSAPAAAAGLLREAGSGVPGERADWRRRQLRKVRSVELDQLPEQPLFLAASPPASSTSPSPEPADAAGSGTGFQPVAVPPPHGAASRGGAHLTESVAAPDSGASSPAAAEPGEKRAPAAEPSPAAAPAGREMENKETLKGLHKMDDRPEERMIREKLKATCMPAWKHEWLERRNRRGPVVVKPIPVKGDGSEMNHLAAESPGEVQASAASPASKGRRSPSPGNSPSGRTVKSESPGVRRKRVSPVPFQSGRITPPRRAPSPDGFSPYSPEETNRRVNKVMRARLYLLQQIGPNSFLIGGDSPDNKYRVFIGPQNCSCARGTFCIHLLFVMLRVFQLEPSDPMLWRKTLKNFEVESLFQKYHSRRSSRIKAPSRNTIQKFVSRMSNSHTLSSSSTSTSSSENSIKDEEEQMCPICLLGMLDEESLTVCEDGCRNKLHHHCMSIWAEECRRNREPLICPLCRSKWRSHDFYSHELSSPVDSPSSLRAAQQQTVQQQPLAGSRRNQESNFNLTHYGTQQIPPAYKDLAEPWIQVFGMELVGCLFSRNWNVREMALRRLSHDVSGALLLANGESTGNSGGSSGSSPSGGATSGSSQTSISGDVVEACCSVLSMVCADPVYKVYVAALKTLRAMLVYTPCHSLAERIKLQRLLQPVVDTILVKCADANSRTSQLSISTLLELCKGQAGELAVGREILKAGSIGIGGVDYVLNCILGNQTESNNWQELLGRLCLIDRLLLEFPAEFYPHIVSTDVSQAEPVEIRYKKLLSLLTFALQSIDNSHSMVGKLSRRIYLSSARMVTTVPHVFSKLLEMLSVSSSTHFTRMRRRLMAIADEVEIAEAIQLGVEDTLDGQQDSFLQASVPNNYLETTENSSPECTVHLEKTGKGLCATKLSASSEDISERLARISVGPSSSTTTTTTTTEQPKPMVQTKGRPHSQCLNSSPLSHHSQLMFPALSTPSSSTPSVPAGTATDVSKHRLQGFIPCRIPSASPQTQRKFSLQFHRNCPENKDSDKLSPVFTQSRPLPSSNIHRPKPSRPTPGNTSKQGDPSKNSMTLDLNSSSKCDDSFGCSSNSSNAVIPSDETVFTPVEEKCRLDVNTELNSSIEDLLEASMPSSDTTVTFKSEVAVLSPEKAENDDTYKDDVNHNQKCKEKMEAEEEEALAIAMAMSASQDALPIVPQLQVENGEDIIIIQQDTPETLPGHTKAKQPYREDTEWLKGQQIGLGAFSSCYQAQDVGTGTLMAVKQVTYVRNTSSEQEEVVEALREEIRMMSHLNHPNIIRMLGATCEKSNYNLFIEWMAGGSVAHLLSKYGAFKESVVINYTEQLLRGLSYLHENQIIHRDVKGANLLIDSTGQRLRIADFGAAARLASKGTGAGEFQGQLLGTIAFMAPEVLRGQQYGRSCDVWSVGCAIIEMACAKPPWNAEKHSNHLALIFKIASATTAPSIPSHLSPGLRDVALRCLELQPQDRPPSRELLKHPVFRTTW

SEQ ID NO: 65 - DNA, 2121 bp, Homo sapiens
  CDS (16)..(1989)
ggaggaagcgtggaaatgtgcttccggacaaagctctcagtatcctgggtgccattgtttcttctactcagccgtgttttttctactgagacagacaaaccctcagcccaggatagcagaagccgtgggagttcaggccaaccggcagacctgctacaggttctctctgctggtgaccacccaccccacaaccactcaagaagcctcatcaaaacattgttggagaaaactgggtgcccacggaggagaaacggaatgcaaggagattgcaatctgtgttttcttccacagtgctttgaaccagatgcactattactaatagctggaggaaattttgaagatcagcttagagaagaagtggtccagagagtttctcttctccttctctattacattattcatcaggaagagatctgttcttcaaagctcaacatgagtaataaagagtataaattttacctacacagcctactgagcctcaggcaggatgaagattcctctttcctttcacagaatgagacagaagatatcttggctttcaccaggcagtactttgacacttctcaaagccagtgtatggaaaccaaaacgctgcagaaaaaatctggaatagtgagcagtgaaggtgctaatgaaagtacgcttcctcagttggcagccatgatcattactttgtccctccagggtgtttgtctgggacaaggaaacttgccttccccagactactttacagaatatattttcagttccttgaatcgtacgaataccctccgcctatcagaactagaccaactcctcaacactctctggaccagaagtacttgtatcaaaaatgagaaaatccatcaatttcaaaggaaacaaaacaacataataacccatgatcaggactattctaatttctcttcatccatggaaaaagagtctgaggatggtccagtttcctgggatcagacctgcttctctgctaggcagctggtggagatatttctacagaagggcctctcactcatttctaaggaggactttaagcaaatgagtccagggatcatccagcagctcctcagctgctcctgccacttacccaaggaccaacaagcaaagctgccacctaccactctggaggaatacggctacagcacggtggctgtcacccttctcacactgggctccatgctggggacagcgctggtccttttccatagctgtgaggagaactacaggcttatcttacagctgtttgtgggcttggccgtcgggacactgtctggggacgctctgctccaccttatccctcaggtacttggtttacataagcaggaagccccagaatttgggcatttccatgaaagcaaaggtcatatttggaaactgatgggattaattggaggcatccatggatttttcttgatagaaaaatgttttattcttcttgtatcaccaaatgacaagaaaagcccagaagattcacaggcagctgaaatgcctataggcagtatgacagcctccaacagaaaatgtaaagccattagcttgttagcaatcatgattctggttggggacagcctgcataattttgcagatggcctagccataggagcagccttctcatcatcatccgagtcaggagtgaccactacgattgctatcttgtgtcatgaaatcccacatgaaatgggagactttgccgtgctcttaagctctggactttctatgaagactgccatcctgatgaattttataagctccctaactgccttcatgggattatacattggcctttccgtgtcagctgatccatgtgttcaagactggatcttcacagtcactgctgggatgttcttatatttatccttggttgaaatgcctgaaatgactcatgttcaaacacaacgaccctggatgatgtttctcctgcaaaactttggattgatcctaggttggctttctctcctgctcttggctatatatgagcaaaatattaaaatataagtgaggatcttcaacatctttcaaaaatgcatttatatagtcttactttgtttctttcattgcactctataatgatttttaaattaagaattttttatcttaggcaaagtgtgtctctttcaattcatt

SEQ ID NO: 66 - protein, 658 aa, Homo sapiens
MCFRTKLSVSWVPLFLLLSRVFSTETDKPSAQDSRSRGSSGQPADLLQVLSAGDHPPHNHSRSLIKTLLEKTGCPRRRNGMQGDCNLCFLPQCFEPDALLLIAGGNFEDQLREEVVQRVSLLLLYYIIHQEEICSSKLNMSNKEYKFYLHSLLSLRQDEDSSFLSQNETEDILAFTRQYFDTSQSQCMETKTLQKKSGIVSSEGANESTLPQLAAMIITLSLQGVCLGQGNLPSPDYFTEYIFSSLNRTNTLRLSELDQLLNTLWTRSTCIKNEKIHQFQRKQNNIITHDQDYSNFSSSMEKESEDGPVSWDQTCFSARQLVEIFLQKGLSLISKEDFKQMSPGIIQQLLSCSCHLPKDQQAKLPPTTLEEYGYSTVAVTLLTLGSMLGTALVLFHSCEENYRLILQLFVGLAVGTLSGDALLHLIPQVLGLHKQEAPEFGHFHESKGHIWKLMGLIGGIHGFFLIEKCFILLVSPNDKKSPEDSQAAEMPIGSMTASNRKCKAISLLAIMILVGDSLHNFADGLAIGAAFSSSSESGVTTTIAILCHEIPHEMGDFAVLLSSGLSMKTAILMNFISSLTAFMGLYIGLSVSADPCVQDWIFTVTAGMFLYLSLVEMPEMTHVQTQRPWMMFLLQNFGLILGWLSLLLLAIYEQNIKI

SEQ ID NO: 67 - DNA, 1152 bp, Homo sapiens
  CDS (61)..(1002)
tactgccgcagcggagttcagagggcccggaggtgggagacttcccacacggtgactgagatgtcgtccactgcggctttttaccttctctctacgctaggaggatacttggtgacctcattcttgttgcttaaatacccgaccttgctgcaccagagaaagaagcagcgattcctcagtaaacacatctctcaccgcggaggtgctggagaaaatttggagaatacaatggcagcctttcagcatgcggttaaaatcggaactgatatgctagaattggactgccatatcacaaaagatgaacaagttgtagcgtcacatgatgagaatctaaagagagcaactggggtcaatgtaaacatctctgatctcaaatactgtgagctcccaccttaccttggcaaactggatgtctcatttcaaagagcatgccagtgtgaaggaaaagataaccgaattccattactgaaggaagtttttgaggcctttcctaacactcccattaacatcgatatcaaagtcaacaacaatgtgctgattaagaaggtatcagagttggtgaagcggtataatcgagaacacttaacagtgtggggtaatgccaattatgaaattgtagaaaagtgctacaaagagaattcagatattcctatactcttcagtctacaacgtgtcctgctcattcttggccttttcttcactggcctcttgccctttgtgcccattcgagaacagttttttgaaatcccaatgccttctattatactgaagctaaaagaaccacacaccatgtccagaagtcaaaagtttctcatctggctttctgatctcttactaatgaggaaagctttgtttgaccacctaactgctcgaggcattcaagtgtatatttgggtattaaatgaagaacaagaatacaaaagagcttttgatttgggagcaactggggtgatgacagactatccaacaaagcttagggattttttacataacttttcagcatagaaaaagaggtacttagaagtattgaaggaaaaaatgaagacctaagaaaaaaatatttcatgatcatttccctaagccatttccagaatggtaaaaggtttaatcagtttttattacctcatttttaagcctgtatgagaatgtaga

SEQ ID NO: 68 - protein, 314 aa, Homo sapiens
MSSTAAFYLLSTLGGYLVTSFLLLKYPTLLHQRKKQRFLSKHISHRGGAGENLENTMAAFQHAVKIGTDMLELDCHITKDEQVVASHDENLKRATGVNVNISDLKYCELPPYLGKLDVSFQRACQCEGKDNRIPLLKEVFEAFPNTPINIDIKVNNNVLIKKVSELVKRYNREHLTVWGNANYEIVEKCYKENSDIPILFSLQRVLLILGLFFTGLLPFVPIREQFFEIPMPSIILKLKEPHTMSRSQKFLIWLSDLLLMRKALFDHLTARGIQVYIWVLNEEQEYKRAFDLGATGVMTDYPTKLRDFLHNFSA

SEQ ID NO: 69 - DNA, 1070 bp, Homo sapiens
  CDS (47)..(988)
agttcagagggcccggaggtgggagacttcccacacggtgactgagatgtcgtccactgcggctttttaccttctctctacgctaggaggatacttggtgacctcattcttgttgcttaaatacccgaccttgctgcaccagagaaagaagcagcgattcctcagtaaacacatctctcaccgcggaggtgctggagaaaatttggagaatacaatggcagcctttcagcatgcggttaaaatcggaactgatatgctagaattggactgccatatcacaaaagatgaacaagttgtagtgtcacatgatgagaatctaaagagagcaactggggtcaatgtaaacatctctgatctcaaatactgtgagctcccaccttaccttggcaaactggatgtctcatttcaaagagcatgccagtgtgaaggaaaagataaccgaattccattactgaaggaagtttttgaggcctttcctaacactcccattaacatcgatatcaaagtcaacaacaatgtgctgattaagaaggtttcagagttggtgaagcggtataatcgagaacacttaacagtgtggggtaatgccaattatgaaattgtagaaaagtgctacaaagagaattcagatattcctatactcttcagtctacaacgtgtcctgctcattcttggccttttcttcactggcctcttgccctttgtgcccattcgagaacagttttttgaaatcccaatgccttctattatactgaagctaaaagaaccacacaccatgtccagaagtcaaaagtttctcatctggctttctgatctcttactaatgaggaaagctttgtttgaccacctaactgctcgaggcattcaagtgtatatttgggtattaaatgaagaacaagaatacaaaagagcttttgatttgggagcaactggggtgatgacagactatccaacaaagcttagggattttttacataacttttcagcatagaaaaagaggtacttagaagtattgaaggaaaaaatgaagacctaagaaaaaaatatttcatgatcatttccctaagcca

SEQ ID NO: 70 - protein, 314 aa, Homo sapiens
MSSTAAFYLLSTLGGYLVTSFLLLKYPTLLHQRKKQRFLSKHISHRGGAGENLENTMAAFQHAVKIGTDMLELDCHITKDEQVVVSHDENLKRATGVNVNISDLKYCELPPYLGKLDVSFQRACQCEGKDNRIPLLKEVFEAFPNTPINIDIKVNNNVLIKKVSELVKRYNREHLTVWGNANYEIVEKCYKENSDIPILFSLQRVLLILGLFFTGLLPFVPIREQFFEIPMPSIILKLKEPHTMSRSQKFLIWLSDLLLMRKALFDHLTARGIQVYIWVLNEEQEYKRAFDLGATGVMTDYPTKLRDFLHNFSA

SEQ ID NO: 71 - DNA, 961 bp, Homo sapiens
  CDS (2)..(961)
caccggatccatgtcgtccactgcggctttttaccttctctctacgctaggaggatacttggtgacctcattcttgttgcttaaatacccgaccttgctgcaccagagaaagaagcagcgattcctcagtaaacacatctctcaccgcggaggtgctggagaaaatttggagaatacaatggcagcctttcagcatgcggttaaaatcggaactgatatgctagaattggactgccatatcacaaaagatgaacaagttgtagtgtcacatgatgagaatctaaagagagcaactggggtcaatgtaaacatctctgatctcaaatactgtgagctcccaccttaccttggcaaactggatgtctcatttcaaagagcatgccagtgtgaaggaaaagataaccgaattccattactgaaggaagtttttgaggcctttcctaacactcccattaacatcgatatcaaagtcaacaacaatgtgctgattaagaaggtttcagagttggtgaagcggtataatcgagaacacttaacagtgtggggtaatgccaattatgaaattgtagaaaagtgctacaaagagaattcagatattcctatactcttcagtctacaacgtgtcctgctcattcttggccttttcttcactggcctcttgccctttgtgcccattcgagaacagttttttgaaatcccaatgccttctattatactgaagctaaaagaaccacacaccatgtccagaagtcaaaagtttctcatctggctttctgatctcttactaatgaggaaagctttgtttgaccacctaactgctcgaggcattcaagtgtatatttgggtattaaatgaagaacaagaatacaaaagagcttttgatttgggagcaactggggtgatgacagactatccaacaaagcttagggattttttacataacttttcagcagtcgacggc

SEQ ID NO: 72 - protein, 320 aa, Homo sapiens
TGSMSSTAAFYLLSTLGGYLVTSFLLLKYPTLLHQRKKQRFLSKHISHRGGAGENLENTMAAFQHAVKIGTDMLELDCHITKDEQVVVSHDENLKRATGVNVNISDLKYCELPPYLGKLDVSFQRACQCEGKDNRIPLLKEVFEAFPNTPINIDIKVNNNVLIKKVSELVKRYNREHLTVWGNANYEIVEKCYKENSDIPILFSLQRVLLILGLFFTGLLPFVPIREQFFEIPMPSIILKLKEPHTMSRSQKFLIWLSDLLLMRKALFDHLTARGIQVYIWVLNEEQEYKRAFDLGATGVMTDYPTKLRDFLHNFSAVDG

SEQ ID NO: 73 - DNA, 865 bp, Homo sapiens
  CDS (2)..(865)
caccggatccagaaagaagcagcgattcctcagtaaacacatctctcaccgcggaggtgctggagaaaatttggagaatacaatggcagcctttcagcatgcggttaaaatcggaactgatatgctagaattggactgccatatcacaaaagatgaacaagttgtagtgtcacatgatgagaatctaaagagagcaactggggtcaatgtaaacatctctgatctcaaatactgtgagctcccaccttaccttggcaaactggatgtctcatttcaaagagcatgccagtgtgaaggaaaagataaccgaattccattactgaaggaagtttttgaggcctttcctaacactcccattaacatcgatatcaaagtcaacaacaatgtgctgattaagaaggtttcagagttggtgaagcggtataatcgagaacacttaacagtgtggggtaatgccaattatgaaattgtagaaaagtgctacaaagagaattcagatattcctatactcttcagtctacaacgtgtcctgctcattcttggccttttcttcactggcctcttgccctttgtgcccattcgagaacagttttttgaaatcccaatgccttctattatactgaagctaaaagaaccacacaccatgtccagaagtcaaaagtttctcatctggctttctgatctcttactaatgaggaaagctttgtttgaccacctaactgctcgaggcattcaagtgtatatttgggtattaaatgaagaacaagaatacaaaagagcttttgatttgggagcaactggggtgatgacagactatccaacaaagcttagggattttttacataacttttcagcagtcgacggc

SEQ ID NO: 74 - protein, 288 aa, Homo sapiens
TGSRKKQRFLSKHISHRGGAGENLENTMAAFQHAVKIGTDMLELDCHITKDEQVVVSHDENLKRATGVNVNISDLKYCELPPYLGKLDVSFQRACQCEGKDNRIPLLKEVFEAFPNTPINIDIKVNNNVLIKKVSELVKRYNREHLTVWGNANYEIVEKCYKENSDIPILFSLQRVLLILGLFFTGLLPFVPIREQFFEIPMPSIILKLKEPHTMSRSQKFLIWLSDLLLMRKALFDHLTARGIQVYIWVLNEEQEYKRAFDLGATGVMTDYPTKLRDFLHNFSAVDG

SEQ ID NO: 75 - DNA, 805 bp, Homo sapiens
  CDS (2)..(805)
caccggatcccaccgcggaggtgctggagaaaatttggagaatacaatggcagcctttcagcatgcggttaaaatcggaactgatatgctagaattggactgccatatcacaaaagatgaacaagttgtagtgtcacatgatgagaatctaaagagagcaactggggtcaatgtaaacatctctgatctcaaatactgtgagctcccaccttaccttggcaaactggatgtctcatttcaaagagcatgccagtgtgaaggaaaagataaccgaattccattactgaaggaagtttttgaggcctttcctaacactcccattaacatcgatatcaaagtcaacaacaatgtgctgattaagaaggtttcagagttggtgaagcggtataatcgagaacacttaacagtgtggggtaatgccaattatgaaattgtagaaaagtgctacaaagagaattcagatattcctatactcttcagtctacaacgtgtcctgctcattcttggccttttcttcactggcctcttgccctttgtgcccattcgagaacagttttttgaaatcccaatgccttctattatactgaagctaaaagaaccacacaccatgtccagaagtcaaaagtttctcatctggctttctgatctcttactaatgaggaaagctttgtttgaccacctaactgctcgaggcattcaagtgtatatttgggtattaaatgaagaacaagaatacaaaagagcttttgatttgggagcaactggggtgatgacagactatccaacaaagcttagggtcgacggc

SEQ ID NO: 76 - protein, 268 aa, Homo sapiens
TGSHRGGAGENLENTMAAFQHAVKIGTDMLELDCHITKDEQVVVSHDENLKRATGVNVNISDLKYCELPPYLGKLDVSFQRACQCEGKDNRIPLLKEVFEAFPNTPINIDIKVNNNVLIKKVSELVKRYNREHLTVWGNANYEIVEKCYKENSDIPILFSLQRVLLILGLFFTGLLPFVPIREQFFEIPMPSIILKLKEPHTMSRSQKFLIWLSDLLLMRKALFDHLTARGIQVYIWVLNEEQEYKRAFDLGATGVMTDYPTKLRVDG

SEQ ID NO: 77 - DNA, 1092 bp, Homo sapiens
  CDS (59)..(1084)
cttagcgagcgctggagtttgaagagcgggcagtggctgcacacgccaaactttccctatggcttcggtgaccagggccgtgtttggagagctgccctcgggaggagggacagtggagaagttccagctgcagtcagacctcttgagagtggacatcatctcctggggctgcacgatcacagccctagaggtcaaagacaggcaggggagagcctcggacgtggtgcttggcttcgccgagttggaagtgtacctccaaaagcagccatactttggagcagttattgggagggtggccaaccgaatcgccaaaggaaccttcaaggtggatgggaaggagtatcacctggccattaacaaggaacccaacagtctgcatggaggagtcagagggtttgataaagtactatggacccctcgggtgctgtcaaatggcgtccagttctcgcgcatcagtccagatggtgaagaaggctaccccggagagttaaaagtctgggtgacatacaccctggatggcggagagctcatagtcaactacagagcacaagccagtcaggccacaccagtcaacctgaccaaccattcttacttcaacctggcaggccaggcttccccaaatataaatgaccatgaagtcaccatagaagcggatacttatttgcctgtggatgaaaccctgattcctacaggtgaggttgccccagtgcaaggcactgcattcgacctgagaaagccagtggagcttggaaaacacctgcaggacttccatctcaatggttttgaccacaatttctgtctgaagggatctaaagaaaagcatttttgtgcaagggtgcatcatgctgcaagcgggcgggtactagaagtatacaccacccagcccggggtccagttttacacgggcaacttcctggatggcacattaaagggcaagaatggagctgtctatcccaagcactccggtttctgcctggagactcagaactggcctgatgcagtcaatcagccccgcttccctcctgtgctgctgaggcctggtgaggagtatgaccacaccacctggttcaagttttctgtggcttaaggaag

SEQ ID NO: 78 - protein, 342 aa, Homo sapiens
MASVTRAVFGELPSGGGTVEKFQLQSDLLRVDIISWGCTITALEVKDRQGRASDVVLGFAELEVYLQKQPYFGAVIGRVANRIAKGTFKVDGKEYHLAINKEPNSLHGGVRGFDKVLWTPRVLSNGVQFSRISPDGEEGYPGELKVWVTYTLDGGELIVNYRAQASQATPVNLTNHSYFNLAGQASPNINDHEVTIEADTYLPVDETLIPTGEVAPVQGTAFDLRKPVELGKHLQDFHLNGFDHNFCLKGSKEKHFCARVHHAASGRVLEVYTTQPGVQFYTGNFLDGTLKGKNGAVYPKHSGFCLETQNWPDAVNQPRFPPVLLRPGEEYDHTTWFKFSVA

SEQ ID NO: 79 - DNA, 1099 bp, Homo sapiens
  CDS (66)..(1091)
cgcccttcttagcgagcgctggagtttgaagagcgggcagtggctgcacacgccaaactttccctatggcttcggtgaccagggccgtgtttggagagctgccctcgggaggagggacagtggagaagttccagctgcagtcagacctcttgagagtggacatcatctcctggggctgcacgatcacagccctagaggtcaaagacaggcaggggagagcctcggacgtggtgcttggcttcgccgagttggaaggatacctccaaaagcagccatactttggagcagttattgggagggtggccaaccgaatcgccaaaggaaccttcaaggtggatgggaaggagtatcacctggccattaacaaggaacccaacagtctgcatggaggagtcagagggtttgataaagtgctctggacccctcgggtgctgtcaaatggcgtccagttctcgcgcatcagtccagatggtgaagaaggctaccccggagagttaaaagtctgggtgacatacaccctggatggcggagagctcatagtcaactacagagcacaagccagtcaggccacaccagtcaacctgaccaaccattcttacttcaacctggcaggccaggcttccccaaatataaatgaccatgaagtcaccatagaagcggatacttatttgcctgtggatgaaaccctgattcctacaggagaagttgccccagtgcaaggcactgcattcgacctgacaaagccagtggagcttggaaaacacctgcaggacttccatctcaatggttttgaccacaatttctgtctgaagggatctaaagaaaagcatttttgtgcaagggtgcatcatgctgcaagcgggcgggtactagaagtatacaccacccagcccggggtccagttttacacgggcaacttcctggatggcacattaaagggcaagaatggagctgtctatcccaagcactccggtttctgcctggagactcagaactggcctgatgcagtcaatcagccccgcttccctcctgtgctgctgaggcctggtgaggagtatgaccacaccacctggttcaagttttctgtggcttaaggaag

SEQ ID NO: 80 - protein, 342 aa, Homo sapiens
MASVTRAVFGELPSGGGTVEKFQLQSDLLRVDIISWGCTITALEVKDRQGRASDVVLGFAELEGYLQKQPYFGAVIGRVANRIAKGTFKVDGKEYHLAINKEPNSLHGGVRGFDKVLWTPRVLSNGVQFSRISPDGEEGYPGELKVWVTYTLDGGELIVNYRAQASQATPVNLTNHSYFNLAGQASPNINDHEVTIEADTYLPVDETLIPTGEVAPVQGTAFDLTKPVELGKHLQDFHLNGFDHNFCLKGSKEKHFCARVHHAASGRVLEVYTTQPGVQFYTGNFLDGTLKGKNGAVYPKHSGFCLETQNWPDAVNQPRFPPVLLRPGEEYDHTTWFKFSVA

SEQ ID NO: 81 - DNA, 1197 bp, Homo sapiens
  CDS (16)..(1152)
ttgatacttccgcaaatgggaaaatctggagtcctggaaagccccaggagctctgatattctctgcacacacgcagaggcaagtaacacacacactttgttgctgcagaatgactcgcgttggagccttttgtgccaggaggaggggacctggtttctggctggaatcagagactttcccagtggctgtctacgtccccgagccttcttccctctgcagactcatggcccatggatcagccatgtgactcggggagcctacctggaggaccagctagcctgggattggggccctgatggggaggagactgagacacagacttgtcccccacacacagagcatggtgcctgtggcctgcggctggaggctgctccagtgggggtcctgtggccctggctggcagaggtgcatgtggctggtgatcgagtctgcactgggatcctcctggccccaggctgggtcctggcagccactcactgtgtcctcaggccaggctctacaacagtgccttacattgaagtgtatctgggccgggcaggggccagctccctcccacagggccaccaggtatcccgcttggtcatcagcatccggctgccccagcacctgggactcaggccccccctggccctcctggagctgagctcccgggtggagccctccccatcagccctgcccatctgtctccacccggcgggtatccccccgggggccagctgctgggtgttgggctggaaagaaccccaggaccgagtccctgtggctgctgctgtctccatcttgacacaacgaatctgtgactgcctctatcagggcatcctgccccctggaaccctctgtgtcctgtatgcagaggggcaggagaacaggtgtgagatgacctcagcaccgcccctcctgtgccagatgacggaagggtcctggatcctcgtgggcatggctgttcaagggagccgggagctgtttgctgccattggtcctgaagaggcctggatctcccagacagtgggagaggccaacttcctgccccccagtggctccccacactggcccactggaggcagcaatctctgccccccagaactggccaaggcctcgggatccccgcatgcagtctacttcctgctcctgctgactctcctgatccagagctgaggggctagggtcccagcaccacttcccccttctccaccctct

SEQ ID NO: 82 - protein, 379 aa, Homo sapiens [sequence omitted]

SEQ ID NO: 83 - DNA, 2897 bp, Homo sapiens
  CDS (13)..(2493)
ggcacgagggcgatggcgacggtcgcagcaaatccagctgctgctgcggcggctgtggcggcggcagcggcggtgactgaggatagagagccacagcacgaggagctgccaggcctggacagccagtggcgccagatagaaaacggcgagagtgggcgagaacgtccactgcgggccggcgaaagctggttccttgtggagaagcactggtataagcagtgggaggcatacgtgcagggaggggaccaggactccagcaccttccctggctgcatcaacaatgccacactctttcaagatgagataaactggcgcctcaaggagggactggtggaaggcgaggattatgtgctgctcccagcagctgcttggcattacctggtcagctggtatggtctagagcatggccagccacccattgaacgcaaggtcatagagctgcccaacatccagaaggtcgaagtgtacccagtagaactgctgcttgtccggcacaatgatttgggcaaatctcacactgttcagttcagccataccgattctattggcctagtattgcgcacagctcgggagcggtttctggtggagccccaggaagacactcggctttgggccaagaactcagaaggctctttggataggttgtatgacacacacatcacggttctcgatgcggcccttgagactgggcagttgatcatcatggagacccgcaagaaagatggcacttggcccagcgcacagctgcatgtcatgaacaacaacatgtcggaagaggatgaggacttcaagggtcagccaggcatctgtggcctcaccaatctgggcaacacgtgcttcatgaactcggccctgcagtgcctcagcaatgtgccacagctcaccgagtacttcctcaacaactgctacctggaggagctcaacttccgcaacccactgggcatgaagggtgagatcgcagaggcctatgcagacctggtgaagcaggcgtggtctggccaccaccgctccattgtgccacatgtgttcaagaacaaggttggccattttgcatcccaatttctgggctaccagcagcatgactctcaggagctgctgtcattcctcctggacgggctgcatgaggaccttaatcgggtgaagaagaaggagtatgtggagctgtgcgatgctgctgggcgaccggatcaggaggtggcacaggaggcatggcaaaaccacaaacggcggaacgattctgtgatcgtggacactttccacggcctcttcaagtccacgctggtgtgccccgattgtggcaatgtatctgtgaccttcgaccccttctgctacctcagtgttccactgcttatcagccacaagagggtcttggaggtcttctttatccccatggatccgcgccgcaagccagagcagcaccggctcgtggtccccaagaaaggcaagatctcggatctatgtgtggctctgtccaaacacacgggcatctcgccagagaggatgatggtggctgatgtcttcagtcaccgcttctataagctctatcagctagaggagcctctgagcagcatcttggaccgtgatgatatcttcgtctatgaggtgtcaggtcgcattgaggccattgagggctcaagagaggacatcgtggttcctgtctacctgcgggagcgcacccctgcccgtgactacaacaactcctactacggcctgatgctttttggacaccccctcctggtatcagtgccccgggaccgcttcacctgggagggcctgtataacgtcctgatgtaccggctctcacgctacgtgaccaaacccaactcagatgatgaggacgatggggatgagaaagaagatgacgaggaggataaagatgacgtccctgggccctcaactgggggcagcctccgagaccctgagccagagcaggctgggcccagctctggagtcacgaacaggtgcccgttcctcctggacaattgccttggcacatctcagtggcccccaaggcgacgacgcaagcagctgttcaccctgcagacggtgaactccaatgggaccagcgaccgcacaacctcccctgaagaagtccatgcccagccgtacattgctatcgactgggagccagagatgaagaagcgttactatgacgaggtagaggctgagggctacgtgaagcatgactgcgtcgggtacgtgatgaagaaggctcccgtgcggctgcaggagtgcattgagctcttcaccactgtggagaccctggagaaggaaaacccctggtactgcccttcctgcaagcagcaccagctggcaaccaagaagctggacctgtggatgctgccggagattctcatcatccacctgaaacgcttttcctacaccaagttctcccgagagaagctggacaccctcgtggagtttcctatccggtcaggggccagggagaggatggctgggggaaggcagggaaaggagggggtgtaccagtattaaccctctccccacccacagggacctggacttctctgagtttgtcatccagccacagaatgagtcgaatccggagctgtacaaatatgacctcatcgcggtttccaaccattatgggggcatgcgtgatggacactacacaacatttgcctgcaacaaggacagcggccagtggcactactttgatgacaacagcgtctcccctgtcaatgagaatcagatcgagtccaaggcagcctatgtcctcttctaccaacgccaggacgtggcgcgacgcctgctgtccccggccggctcatctggcgccccagcctcccctgcctgcagctccccacccagctctgagttcatggatgttaattgagagccctgggtcctgccacagaaaaaaaaaaaaaaaaaaa

SEQ ID NO: 84 - protein, 827 aa, Homo sapiens
MATVAANPAAAAAAVAAAAAVTEDREPQHEELPGLDSQWRQIENGESGRERPLRAGESWFLVEKHWYKQWEAYVQGGDQDSSTFPGCINNATLFQDEINWRLKEGLVEGEDYVLLPAAAWHYLVSWYGLEHGQPPIERKVIELPNIQKVEVYPVELLLVRHNDLGKSHTVQFSHTDSIGLVLRTARERFLVEPQEDTRLWAKNSEGSLDRLYDTHITVLDAALETGQLIIMETRKKDGTWPSAQLHVMNNNMSEEDEDFKGQPGICGLTNLGNTCFMNSALQCLSNVPQLTEYFLNNCYLEELNFRNPLGMKGEIAEAYADLVKQAWSGHHRSIVPHVFKNKVGHFASQFLGYQQHDSQELLSFLLDGLHEDLNRVKKKEYVELCDAAGRPDQEVAQEAWQNHKRRNDSVIVDTFHGLFKSTLVCPDCGNVSVTFDPFCYLSVPLLISHKRVLEVFFIPMDPRRKPEQHRLVVPKKGKISDLCVALSKHTGISPERMMVADVFSHRFYKLYQLEEPLSSILDRDDIFVYEVSGRIEAIEGSREDIVVPVYLRERTPARDYNNSYYGLMLFGHPLLVSVPRDRFTWEGLYNVLMYRLSRYVTKPNSDDEDDGDEKEDDEEDKDDVPGPSTGGSLRDPEPEQAGPSSGVTNRCPFLLDNCLGTSQWPPRRRRKQLFTLQTVNSNGTSDRTTSPEEVHAQPYIAIDWEPEMKKRYYDEVEAEGYVKHDCVGYVMKKAPVRLQECIELFTTVETLEKENPWYCPSCKQHQLATKKLDLWMLPEILIIHLKRFSYTKFSREKLDTLVEFPIRSGARERMAGGRQGKEGVYQY

SEQ ID NO: 85 - DNA, 1552 bp, Homo sapiens
  CDS (57)..(1451)
cagaaatctcaggtcagaggcacggacagcctctggagctctcgtctggtgggaccatgaactgccagcagctgtggctgggcttcctactccccatgacagtctcaggccgggtcctggggcttgcagaggtggcgcccgtggactacctgtcacaatatgggtacctacagaagcctctagaaggatctaataacttcaagccagaagatatcaccgaggctctgagagcttttcaggaagcatctgaacttccagtctcaggtcagctggatgatgccacaagggcccgcatgaggcagcctcgttgtggcctagaggatcccttcaaccagaagacccttaaatacctgttgctgggccgctggagaaagaagcacctgactttccgcatcttgaacctgccctccacccttccaccccacacagcccgggcagccctgcgtcaagccttccaggactggagcaatgtggctcccttgaccttccaagaggtgcaggctggtgcggctgacatccgcctctccttccatggccgccaaagctcgtactgttccaatacttttgatgggcctgggagagtcctggcccatgccgacatcccagagctgggcagtgtgcacttcgacgaagacgagttctggactgaggggacctaccgtggggtgaacctgcgcatcattgcagcccatgaagtgggccatgctctggggcttgggcactcccgatattcccaggccctcatggccccagtctacgagggctaccggccccactttaagctgcacccagatgatgtggcagggatccaggctctctatgggccccgtgggaagacctatgctttcaagggggactatgtgtggactgtatcagattcaggaccgggccccttgttccgagtgtctgccctttgggaggggctccccggaaacctggatgctgctgtctactcgcctcgaacacaatggattcacttctttaagggagacaaggtgtggcgctacattaatttcaagatgtctcctggcttccccaagaagctgaatagggtagaacctaacctggatgcagctctctattggcctctcaaccaaaaggtgttcctctttaagggctccgggtactggcagtgggacgagctagcccgaactgacttcagcagctaccccaaaccaatcaagggtttgtttacgggagtgccaaaccagccctcggctgctatgagttggcaagatggccgagtctacttcttcaagggcaaagtctactggcgcctcaaccagcagcttcgagtagagaaaggctatcccagaaatatttcccacaactggatgcactgtcgtccccggactatagacactaccccatcaggtgggaataccactccctcaggtacgggcataaccttggataccactctctcagccacagaaaccacgtttgaatactgactgctcacccacagacacaatcttggacattaacccctgaggctccaccacccaccctttcatttcccccccagaagcctaaggcctaatagctgaat

SEQ ID NO: 86 - protein, 465 aa, Homo sapiens
MNCQQLWLGFLLPMTVSGRVLGLAEVAPVDYLSQYGYLQKPLEGSNNFKPEDITEALRAFQEASELPVSGQLDDATRARMRQPRCGLEDPFNQKTLKYLLLGRWRKKHLTFRILNLPSTLPPHTARAALRQAFQDWSNVAPLTFQEVQAGAADIRLSFHGRQSSYCSNTFDGPGRVLAHADIPELGSVHFDEDEFWTEGTYRGVNLRIIAAHEVGHALGLGHSRYSQALMAPVYEGYRPHFKLHPDDVAGIQALYGPRGKTYAFKGDYVWTVSDSGPGPLFRVSALWEGLPGNLDAAVYSPRTQWIHFFKGDKVWRYINFKMSPGFPKKLNRVEPNLDAALYWPLNQKVFLFKGSGYWQWDELARTDFSSYPKPIKGLFTGVPNQPSAAMSWQDGRVYFFKGKVYWRLNQQLRVEKGYPRNISHNWMHCRPRTIDTTPSGGNTTPSGTGITLDTTLSATETTFEY

SEQ ID NO: 87 - DNA, 4487 bp, Homo sapiens
  CDS (275)..(2512)
ccgcgtccgcggacgcgtgggggcgagggccgctggggccgcgaagtggggcggccgggtgggctacgagccgggtctgggctgaggggcgcggcttcgcggtggaccccagcccggcaacgggaaggcgagctctcctccaccgtccaaagtaaactttgccgctccttccgcggcgctcccgagtcctcgccgccgccgggccgccgcagtccgcgaagagccgtcctgcgtcagggcctccttccctgccccggcgcggggccactgcgccatggacgccacagcactggagcgggacgctgtgcagttcgcccgtctggcggttcagcgcgaccacgaaggccgctactccgaggcggtgttttattacaaggaagctgcacaagccttaatttatgctgagatggcaggatcaagcctagaaaatattcaagaaaaaataactgagtatctggaaagagttcaagctctacattcagcagttcagtcaaagagtgctgatcctttgaagtcaaaacatcagttggacttagagcgtgctcatttccttgttacacaagcttttgatgaagatgaaaaagagaatgttgaagatgctatagaattgtacacagaagctgtggatctctgtctgaaaacatcttatgaaactgctgataaagtcctgcaaaataaactgaaacagttggctcgacaggcactagacagagcagaagcgctgagtgagcctttgaccaagccagttggcaaaatcagttcaacaagtgttaagccaaagccacctccagtgagagcacattttccactgggcgctaatcccttccttgaaagacctcagtcatttataagtcctcagtcatgtgatgcacaaggacagagatacacagcagaagaaatagaagtactcaggacaacatcaaaaataaatggtatagaatatgttcctttcatgaatgttgacctgagagaacgttttgcctatccaatgcctttctgtgatagatggggcaagctaccattatcacctaaacaaaaaactacattttccaagtgggtacgaccagaagacctcaccaacaatcctacaatgatatatactgtgtccagttttagcataaagcagacaatagtatcggattgctcctttgtggcatcactggccatcagtgcagcttatgaaagacgttttaataagaagttaattaccggcataatttaccctcaaaacaaggatggtgaaccagaatacaatccatgtgggaagtatatggtaaaacttcacctcaatggtgtcccaagaaaggtgataattgatgaccagttacctgttgatcacaagggagaattgctctgttcttattccaacaacaaaagtgaattatgggtttctctcatagaaaaagcatacatgaaagtcatgggaggatatgattttccaggatccaactccaatattgatcttcatgcactgactggctggataccagaaagaattgctatgcattcagatagccaaactttcagtaaggataattctttcagaatgctttatcaaagatttcacaaaggagatgtcctcatcactgcgtcaactggaatgatgacagaagctgaaggagagaagtggggtctggttcccacacacgcatatgctgttttggatattagagagttcaaggggctgcgatttatccagttgaaaaatccttggagtcatttacgttggaaaggaagatacagtgaaaatgatgtaaaaaactggactccagagttgcaaaagtatttaaactttgatccccgaacagctcagaaaatagacaacggaatattttggatttcctgggatgatctctgccagtattatgatgtgatttatttgagttggaatccaggtctttttaaagaatcaacatgtattcacagtacttgggatgctaagcaaggacctgtgaaagatgcctatagcctggccaacaacccccagtacaaactggaggtgcagtgtccacaggggggtgctgcagtttgggttttgcttagtagacacataacagacaaggatgattttgcgaataatcgagaatttatcacaatggttgtatacaagactgatggaaaaaaagtttattacccagctgacccacctccatacattgatggaattcgaattaacagccctcattatttgactaagataaagctgaccacacctggcacccatacctttacattagtggtttctcaatatgaaaaacagaacacaatccattacacggttcgggtatattcagcatgcagctttactttttcaaagattccttcaccatacaccttatcaaaacggattaatggaaagtggagtggtcagagtgctggaggatgtggaaatttccaagagactcacaaaaataaccccatctaccaattccatatagaaaagactgggccgttactgattgagctacgaggaccaaggagatcctggtccccatggctttctgaggaaatctagtggtgactataggtgtgggttttgctacctggaattagaaatataccttctgggatcttcaatatcattcctagtacctttttgcctaaacaagaaggaccttttttcttggactttaatagtattatccccatcaagatcacacaacttcagtgatggagaaatctcaagttactggcttttatacttaccaaacatcagttcttcaaataaggacgcaaatcttcaggacagtaagcagaacaatcagaatggaattaaatctctaaaaacgtgttacagtggaatctggtgcttgtcagggtgtttggtaagaactgtatatagtcagaattacctaaatcacctagaggtaccgtttacatggttttgtgtatatagagttggcttgcattttaggggccattttgtataaaaagtgcatatgattaaaattagactcagtcatcactgtgagatgcctttgctaagaggataaaggaactgagaccagatgagaaaaagaaaggatatagattccttgagtggaatagtgggctagattaatataccgaaatatttccattgtttcccttttttgcagagcatgtggaagttaaacctgcttgattctactatacatcttgggcaactagttaccaaatgaattgtgccaccataactgattttaattttgcattatttatgattttaaaatatttgttgcccaggtgttatgaaagaataaagcttttaagtatagactaccttagcatgaagatgctcatgcctaagaatgaaaattgttgaggttatctcccattcaatcatgtagcaagaacttaaagaaattcactactgcagtttttatttttaaaaaacagtaattgagatattgaagacattacaatttagtttgtgtggtctttttttaaattgctgtatcgttcagtctcttgtggcaatagcactttgaagaaaatagagaatttaatatatggtgattgggatatgtagcattcaaaaaaagtgaattgccaagatactggtgtcatgtaaattcccactttacataaaaacccatcaggacagaatgatgctcaatattttaaaattctaaaaatagggtgggatttttcattgtctctactttataattatcaaaacttattttgtattgctactaccttaaattgaaataaaatgtttatacttacggatattgcatagtttaagttagatttattgaaagatttcatctgtcgtgtttcatgtaaatgagaacagattatttgcatgaaaatatatacttcaacaaaaatctgttctttaacagagtagtggtagattattacactaatgagatttcactttggtaaatacttcatgctttcagttttagcctattaattttaggtggacaaatttaacaagttttctgttactttttaaaaagaaaaaatccagaacataagaactatattatgaacacatgatttgaacctgttgtggtaaagatcttgtacaggatgcaaactaaaaacctaatccctgccatcaaatttattagaagagacctatatatgaacaacttaaaggcactgatttctataatagagctctaaaaacatgccaccagtgtatgaataagggaaagattaattttggctggaccaatataaaaaattgtatttgaagaattgatactttaacttggaccttgaaggtaaagcttcaaaagacaggttactgaccattgagtgtttactatgtacccaatgtgtatatttttctttttaatcttcccaatagctgaataaagtatagatactattatttgtacttcttacaattgaggaaataagcctaagagattaaaagattttgcccagggttcacaagccttcttccctgagccctgattgagctgctgtgtgtgtctaatggcacccacagtcacggccgtctagtcgagggagggacaagatctaga

SEQ ID NO: 88 - protein, 746 aa, Homo sapiens
MDATALERDAVQFARLAVQRDHEGRYSEAVFYYKEAAQALIYAEMAGSSLENIQEKITEYLERVQALHSAVQSKSADPLKSKHQLDLERAHFLVTQAFDEDEKENVEDAIELYTEAVDLCLKTSYETADKVLQNKLKQLARQALDRAEALSEPLTKPVGKISSTSVKPKPPPVRAHFPLGANPFLERPQSFISPQSCDAQGQRYTAEEIEVLRTTSKINGIEYVPFMNVDLRERFAYPMPFCDRWGKLPLSPKQKTTFSKWVRPEDLTNNPTMIYTVSSFSIKQTIVSDCSFVASLAISAAYERRFNKKLITGIIYPQNKDGEPEYNPCGKYMVKLHLNGVPRKVIIDDQLPVDHKGELLCSYSNNKSELWVSLIEKAYMKVMGGYDFPGSNSNIDLHALTGWIPERIAMHSDSQTFSKDNSFRMLYQRFHKGDVLITASTGMMTEAEGEKWGLVPTHAYAVLDIREFKGLRFIQLKNPWSHLRWKGRYSENDVKNWTPELQKYLNFDPRTAQKIDNGIFWISWDDLCQYYDVIYLSWNPGLFKESTCIHSTWDAKQGPVKDAYSLANNPQYKLEVQCPQGGAAVWVLLSRHITDKDDFANNREFITMVVYKTDGKKVYYPADPPPYIDGIRINSPHYLTKIKLTTPGTHTFTLVVSQYEKQNTIHYTVRVYSACSFTFSKIPSPYTLSKRINGKWSGQSAGGCGNFQETHKNNPIYQFHIEKTGPLLIELRGPRRSWSPWLSEEI

SEQ ID NO: 89 - DNA, 1323 bp, Homo sapiens
  CDS (1)..(1320)
atgagcaactccgttcctctgctctgtttctggagcctctgctattgctttgctgcggggagccccgtaccttttggtccagagggacggctggaagataagctccacaaacccaaagctacacagactgaggtcaaaccatctgtgaggtttaacctccgcacctccaaggacccagagcatgaaggatgctacctctccgtcggccacagccagcccttagaagactgcagtttcaacatgacagctaaaacctttttcatcattcacggatggacggagaaggacgatttttctctcgggaatgtccacttgatcggctacagcctcggagcgcacgtggccgggtatgcaggcaacttcgtgaaaggaacggtgggccgaatcacaggtttggatcctgccgggcccatgtttgaaggggccgacatccacaagaggctctctccggacgatgcagattttgtggatgtcctccacacctacacgcgttccttcggcttgagcattggtattcagatgcctgtgggccacattgacatctaccccaatgggggtgacttccagccaggctgtggactcaacgatgtcttgggatcaattgcatatggaacaatcacagaggtggtaaaatgtgagcatgagcgagccgtccacctctttgttgactctctggtgaatcaggacaagccgagttttgccttccagtgcactgactccaatcgcttcaaaaaggggatctgtctgagctgccgcaagaaccgttgtaatagcattggctacaatgccaagaaaatgaggaacaagaggaacagcaaaatgtacctaaaaacccgggcaggcatgcctttcagagtttaccattatcagatgaaaatccatgtcttcagttacaagaacatgggagaaattgagcccaccttttacgtcaccctttatggcactaatgcagattcccagactctgccactggaaatagtggagcggatcgagcagaatgccaccaacaccttcctggtctacaccgaggaggacttgggagacctcttgaagatccagctcacctgggagggggcctctcagtcttggtacaacctgtggaaggagtttcgcagctacctgtctcaaccccgcaaccccggacgggagctgaatatcaggcgcatccgggtgaagtctggggaaacccagcggaaactgacattttgtacagaagaccctgagaacaccagcatatccccaggccgggagctctggtttcgcaagtgtcgggatggctggaggatgaaaaacgaaaccagtcccactgtggagcttccctga

SEQ ID NO: 90 - protein, 440 aa, Homo sapiens
MSNSVPLLCFWSLCYCFAAGSPVPFGPEGRLEDKLHKPKATQTEVKPSVRFNLRTSKDPEHEGCYLSVGHSQPLEDCSFNMTAKTFFIIHGWTEKDDFSLGNVHLIGYSLGAHVAGYAGNFVKGTVGRITGLDPAGPMFEGADIHKRLSPDDADFVDVLHTYTRSFGLSIGIQMPVGHIDIYPNGGDFQPGCGLNDVLGSIAYGTITEVVKCEHERAVHLFVDSLVNQDKPSFAFQCTDSNRFKKGICLSCRKNRCNSIGYNAKKMRNKRNSKMYLKTRAGMPFRVYHYQMKIHVFSYKNMGEIEPTFYVTLYGTNADSQTLPLEIVERIEQNATNTFLVYTEEDLGDLLKIQLTWEGASQSWYNLWKEFRSYLSQPRNPGRELNIRRIRVKSGETQRKLTFCTEDPENTSISPGRELWFRKCRDGWRMKNETSPTVELP

SEQ ID NO: 91 - DNA, 608 bp, Homo sapiens
  CDS (1)..(606)
atgagcaactccgttcctctgctctgtttctggagcctctgctattgctttgctgcggggagccccgtaccttttggtccagagggacggctggaagataagctccacaaacccaaagctacacagactgaggtcaaaccatctgtgaggtttaacctccgcacctccaaggacccagagcatgaaggatgctacctctccgtcggccacagccagcccttagaagactgcagtttcaacatgacagctaaaacctttttcatcattcacggatggacggagaaggacgatttttctctcgggaatgtccacttgatcggctacagcctcggagcgcacgtggccgggtatgcaggcaacttcgtgaaaggaacggtgggccgaatcacaggtttggatcctgccgggcccatgtttgaaggggccgacatccacaagaggctctctccggacgatgcagattttgtggatgtcctccacacctacacgcgttccttcggcttgagcattggtattcagatgcctgtgggccacattgacatctaccccaatgggggtgacttccagccaggctgtggactcaacgatgtcttgggatcaattgccta

SEQ ID NO: 92 - protein, 202 aa, Homo sapiens
MSNSVPLLCFWSLCYCFAAGSPVPFGPEGRLEDKLHKPKATQTEVKPSVRFNLRTSKDPEHEGCYLSVGHSQPLEDCSFNMTAKTFFIIHGWTEKDDFSLGNVHLIGYSLGAHVAGYAGNFVKGTVGRITGLDPAGPMFEGADIHKRLSPDDADFVDVLHTYTRSFGLSIGIQMPVGHIDIYPNGGDFQPGCGLNDVLGSIA

SEQ ID NO: 93 - DNA, 3067 bp, Homo sapiens
  CDS (227)..(2890)
aaggcaattaaggcgcccatttcagaagagttacagccgtgaaaattactcagcagtgcagttggctgagaagaggaaaaaaggtcaggttgtaaagctttttatttttccattttctaagagaaattcatcattggaacttgtaaagtggcccaagagtggctgtaatttgggccattatagcaggtatgggtggcgtctctcagcaaagctgactgactgactgatgagtgctgtttgcaatgacctccgctggaacataatgagagcgctcgctgtgctgtctgtcacgctggttatggcctgcacagaagccttcttccccttcatctcgagagggaaagaactcctttggggaaagcctgaggagtctcgtgtctctagcgtcttggaggaaagcaagcgcctggtggacaccgccatgtacgccacgatgcagagaaacctcaagaaaagaggaatcctttctccagctcagcttctgtctttttccaaacttcctgagccaacaagcggagtgattgcccgagcagcagagataatggaaacatcaatacaagcgatgaaaagaaaagtcaacctgaaaactcaacaatcacagcatccaacggatgctttatcagaagatctgctgagcatcattgcaaacatgtctggatgtctcccttacatgctgcccccaaaatgcccaaacacttgcctggcgaacaaatacaggcccatcacaggagcttgcaacaacagagaccaccccagatggggcgcctccaacacggccctggcacgatggctccctccagtctatgaggacggcttcagtcagccccgaggctggaaccccggcttcttgtacaacgggttcccactgcccccggtccgggaggtgacaagacatgtcattcaagtttcaaatgaggttgtcacagatgatgaccgctattctgacctcctgatggcatggggacaatacatcgaccacgacatcgcgttcacaccacagagcaccagcaaagctgccttcgggggaggggctgactgccagatgacttgtgagaaccaaaacccatgttttcccatacaactcccggaggaggcccggccggccgcgggcaccgcctgtctgcccttctaccgctcttcggccgcctgcggcaccggggaccaaggcgcgctctttgggaacctgtccacggccaacccgcggcagcagatgaacgggttgacctcgttcctggacgcgtccaccgtgtatggcagctccccggccctagagaggcagctgcggaactggaccagtgccgaagggctgctccgcgtccacgcgcgcctccgggactccggccgcgcctacctgcccttcgtgccgccacgcgcgccttcggcctgtgcgcccgagcccggcatccccggagagacccgcgggccctgcttcctggccggagacggccgcgccagcgaggtcccctccctgacggcactgcacacgctgtggctgcgcgagcacaaccgcctggccgcggcgctcaaggccctcaatgcgcactggagcgcggacgccgtgtaccaggaggcgcgcaaggtcgtgggcgctctgcaccagatcatcaccctgagggattacatccccaggatcctgggacccgaggccttccagcagtacgtgggtccctatgaaggctatgactccaccgccaaccccactgtgtccaacgtgttctccacagccgccttccgcttcggccatgccacgatccacccgctggtgaggaggctggacgccagcttccaggagcaccccgacctgcccgggctgtggctgcaccaggctttcttcagcccatggacattactccgtggaggttacaatgagtggagggagttctgcggcctgcctcgcctggagacccccgctgacctgagcacagccatcgccagcaggagcgtggccgacaagatcctggacttgtacaagcatcctgacaacatcgatgtctggctgggaggcttagctgaaaacttcctccccagggctcggacagggcccctgtttgcctgtctcattgggaagcagatgaaggctctgcgggatggtgactggttttggtgggagaacagccacgtcttcacggatgcacagaggcgtgagctggagaagcactccctgtctcgggtcatctgtgacaacactggcctcaccagggtgcccatggatgccttccaagtcggcaaattccccgaagactttgagtcttgtgacagcatccctggcatgaacctggaggcctggagggaaacctttcctcaagacgacaagtgtggcttcccagagagcgtggagaatggggactttgtgcactgtgaggagtctgggaggcgcgtgctggtgtattcctgccggcacgggtatgagctccaaggccgggagcagctcacttgcacccaggaaggatgggatttccagcctcccctctgcaaagatgtgaacgagtgtgcagacggtgcccaccccccctgccacgcctctgcgaggtgcagaaacaccaaaggcggcttccagtgtctctgcgcggacccctacgagttaggagacgatgggagaacctgcgtagactccgggaggctccctcgggcgacttggatctccatgtcgctggctgctctgctgatcggaggcttcgcaggtctcacctcgacggtgatttgcaggtggacacgcactggcactaaatccacactgcccatctcggagacaggcggaggaactcccgagctgagatgcggaaagcaccaggccgtagggacctcaccgcagcgggccgcagctcaggactcggagcaggagagtgctgggatggaaggccgggatactcacaggctgccgagagccctctgagggcaaagtggcaggacactgcagaacagcttcatgttcccaaaatcaccgtacgactcttttccaaacacaggcaaatcggaaatcagcaggacgactgttttcccaacacgggtaaatctagtaccatgtcgtagttactctcaggcatggatgaataaatgttatagctgc

SEQ ID NO: 94 - protein, 888 aa, Homo sapiens
MSAVCNDLRWNIMRALAVLSVTLVMACTEAFFPFISRGKELLWGKPEESRVSSVLEESKRLVDTAMYATMQRNLKKRGILSPAQLLSFSKLPEPTSGVIARAAEIMETSIQAMKRKVNLKTQQSQHPTDALSEDLLSIIANMSGCLPYMLPPKCPNTCLANKYRPITGACNNRDHPRWGASNTALARWLPPVYEDGFSQPRGWNPGFLYNGFPLPPVREVTRHVIQVSNEVVTDDDRYSDLLMAWGQYIDHDIAFTPQSTSKAAFGGGADCQMTCENQNPCFPIQLPEEARPAAGTACLPFYRSSAACGTGDQGALFGNLSTANPRQQMNGLTSFLDASTVYGSSPALERQLRNWTSAEGLLRVHARLRDSGRAYLPFVPPRAPSACAPEPGIPGETRGPCFLAGDGRASEVPSLTALHTLWLREHNRLAAALKALNAHWSADAVYQEARKVVGALHQIITLRDYIPRILGPEAFQQYVGPYEGYDSTANPTVSNVFSTAAFRFGHATIHPLVRRLDASFQEHPDLPGLWLHQAFFSPWTLLRGGYNEWREFCGLPRLETPADLSTAIASRSVADKILDLYKHPDNIDVWLGGLAENFLPRARTGPLFACLIGKQMKALRDGDWFWWENSHVFTDAQRRELEKHSLSRVICDNTGLTRVPMDAFQVGKFPEDFESCDSIPGMNLEAWRETFPQDDKCGFPESVENGDFVHCEESGRRVLVYSCRHGYELQGREQLTCTQEGWDFQPPLCKDVNECADGAHPPCHASARCRNTKGGFQCLCADPYELGDDGRTCVDSGRLPRATWISMSLAALLIGGFAGLTSTVICRWTRTGTKSTLPISETGGGTPELRCGKHQAVGTSPQRAAAQDSEQESAGMEGRDTHRLPRAL

SEQ ID NO: 95 - DNA, 2921 bp, Homo sapiens
  CDS (15)..(2870)
gggctccggaggccatgccggcgttggcgcgcgacggcggccagctgccgctgctcgttgttttttctgcaatgatatttgggactattacaaatcaagatctgcctgtgatcaagtgtgttttaatcaatcataagaacaatgattcatcagtggggaagtcatcatcatatcccatggtatcagaatccccggaagacctcgggtgtgcgttgagaccccagagctcagggacagtgtacgaagctgccgctgtggaagtggatgtatctgcttccatcacactgcaagtgctggtcgatgccccagggaacatttcctgtctctgggtctttaagcacagctccctgaattgccagccacattttgatttacaaaacagaggagttgtttccatggtcattttgaaaatgacagaaacccaagctggagaatacctactttttattcagagtgaagctaccaattacacaatattgtttacagtgagtataagaaataccctgctttacacattaagaagaccttactttagaaaaatggaaaaccaggacgccctggtctgcatatctgagagcgttccagagccgatcgtggaatgggtgctttgcgattcacagggggaaagctgtaaagaagaaagtccagctgttgttaaaaaggaggaaaaagtgcttcatgaattatttgggatggacataaggtgctgtgccagaaatgaactgggcagggaatgcaccaggctgttcacaatagatctaaatcaaactcctcagaccacattgccacaattatttcttaaagtaggggaacccttatggataaggtgcaaagctgttcatgtgaaccatggattcgggctcacctgggaattagaaaacaaagcactcgaggagggcaactactttgagatgagtacctattcaacaaacagaactatgatacggattctgtttgcttttgtatcatcagtggcaagaaacgacaccggatactacacttgttcctcttcaaagcatcccagtcaatcagctttggttaccatcgtagaaaagggatttataaatgctaccaattcaagtgaagattatgaaattgaccaatatgaagagttttgtttttctgtcaggtttaaagcctacccacaaatcagatgtacgtggaccttctctcgaaaatcatttccttgtgagcaaaagggtcttgataacggatacagcatatccaagttttgcaatcataagcaccagccaggagaatatatattccatgcagaaaatgatgatgcccaatttaccaaaatgttcacgctgaatataagaaggaaacctcaagtgctcgcagaagcatcggcaagtcaggcgtcctgtttctcggatggatacccattaccatcttggacctggaagaagtgttcagacaagtctcccaactgcacagaagagatcacagaaggagtctggaatagaaaggctaacagaaaagtgtttggacagtgggtgtcgagcagtactctaaacatgagtgaagccataaaagggttcctggtcaagtgctgtgcatacaattcccttggcacatcttgtgagacgatccttttaaactctccaggccccttccctttcatccaagacaacatctcattctatgcaacaattggtgtttgtctcctcttcattgtcgttttaaccctgctaatttgtcacaagtacaaaaagcaatttaggtatgaaagccagctacagatggtacaggtgaccggctcctcagataatgagtacttctacgttgatttcagagaatatgaatatgatctcaaatgggagtttccaagagaaaatttagagtttgggaaggtactaggatcaggtgcttttggaaaagtgatgaacgcaacagcttatggaattagcaaaacaggagtctcaatccaggttgccgtcaaaatgctgaaagaaaaagcagacagctctgaaagagaggcactcatgtcagaactcaaggtgatgacccagctgggaagccacgagaatattgtgaacctgctgggggcgtgcacactgtcaggaccaatttacttgatttttgaatactgttgctatggtgatcttctcaactatctaagaagtaaaagagaaaaatttcacaggacttggacagagattttcaaggaacacaatttcagtttttaccccactttccaatcacatccaaattccagcatgcctggttcaagagaagttcagatacacccggactcggatcaaatctcagggcttcatgggaattcatttcactctgaagatgaaattgaatatgaaaaccaaaaaaggctggaagaagaggaggacttgaatgtgcttacatttgaagatcttctttgctttgcatatcaagttgccaaaggaatggaatttctggaatttaagtcggcccgtctgcctgtaaaatggatggcccccgaaagcctgtttgaaggcatctacaccattaagagtgatgtctggtcatatggaatattactgtgggaaatcttctcacttggtgtgaatccttaccctggcattccggttgatgctaacttctacaaactgattcaaaatggatttaaaatggatcagccattttatgctacagaagaaatatacattataatgcaatcctgctgggcttttgactcaaggaaacggccatccttccctaatttgacttcgtttttaggatgtcagctggcagatgcagaagaagcgatgtatcagaatgtggatggccgtgtttcggaatgtcctcacacctaccaaaacaggcgacctttcagcagagagatggatttggggctactctctccgcaggctcaggtcgaagattcgtagaggaacaatttagttttaaggacttcatccctccacctatccctaaca

SEQ ID NO: 96 - protein, 952 aa, Homo sapiens
MPALARDGGQLPLLVVFSAMIFGTITNQDLPVIKCVLINHKNNDSSVGKSSSYPMVSESPEDLGCALRPQSSGTVYEAAAVEVDVSASITLQVLVDAPGNISCLWVFKHSSLNCQPHFDLQNRGVVSMVILKMTETQAGEYLLFIQSEATNYTILFTVSIRNTLLYTLRRPYFRKMENQDALVCISESVPEPIVEWVLCDSQGESCKEESPAVVKKEEKVLHELFGMDIRCCARNELGRECTRLFTIDLNQTPQTTLPQLFLKVGEPLWIRCKAVHVNHGFGLTWELENKALEEGNYFEMSTYSTNRTMIRILFAFVSSVARNDTGYYTCSSSKHPSQSALVTIVEKGFINATNSSEDYEIDQYEEFCFSVRFKAYPQIRCTWTFSRKSFPCEQKGLDNGYSISKFCNHKHQPGEYIFHAENDDAQFTKMFTLNIRRKPQVLAEASASQASCFSDGYPLPSWTWKKCSDKSPNCTEEITEGVWNRKANRKVFGQWVSSSTLNMSEAIKGFLVKCCAYNSLGTSCETILLNSPGPFPFIQDNISFYATIGVCLLFIVVLTLLICHKYKKQFRYESQLQMVQVTGSSDNEYFYVDFREYEYDLKWEFPRENLEFGKVLGSGAFGKVMNATAYGISKTGVSIQVAVKMLKEKADSSEREALMSELKVMTQLGSHENIVNLLGACTLSGPIYLIFEYCCYGDLLNYLRSKREKFHRTWTEIFKEHNFSFYPTFQSHPNSSMPGSREVQIHPDSDQISGLHGNSFHSEDEIEYENQKRLEEEEDLNVLTFEDLLCFAYQVAKGMEFLEFKSARLPVKWMAPESLFEGIYTIKSDVWSYGILLWEIFSLGVNPYPGIPVDANFYKLIQNGFKMDQPFYATEEIYIIMQSCWAFDSRKRPSFPNLTSFLGCQLADAEEAMYQNVDGRVSECPHTYQNRRPFSREMDLGLLSPQAQVEDS

SEQ ID NO: 97 - DNA, 3270 bp, Homo sapiens
  CDS (1)..(3000)
atgccggcgttggcgcgcgacggcggccagctgccgctgctcgttgttttttctgcaatgatatttgggactattacaaatcaagatctgcctgtgatcaagtgtgttttaatcaatcataagaacaatgattcatcagtggggaagtcatcatcatatcccatggtatcagaatccccggaagacctcgggtgtgcgttgagaccccagagctcagggacagtgtacgaacgtgccgctgtggaagtggatgtatctgcttccatcacactgcaagtgctggtcgatgccccagggaacatttcctgtctctgggtctttaagcacagctccctgaattgccagccacattttgatttacaaaacagaggagttgtttccatggtcattttgaaaatgacagaaacccaagctggagaatacctactttttattcagagtgaagctaccaattacacaatattgtttacagtgagtataagaaataccctgctttacacattaagaagaccttactttagaaaaatggaaaaccaggacgccctggtctgcatatctgagagcgttccagagccgatcgtggaatgggtgctttgcgattcacagggggaaagctgtaaagaagaaagtccagctgttgttaaaaaggaggaaaaagtgcttcatgaattatttgggatggacataaggtgctgtgccagaaatgaactgggcagggaatgcaccaggctgttcacaatagatctaaatcaaactcctcagaccacattgccacaattatttcttaaagtaggggaacccttatggataaggtgcaaagctgttcatgtgaaccatggattcgggctcacctgggaattagaaaacaaagcactcgaggagggcaactactttgagatgagtacctattcaacaaacagaactatgatacggattctgtttgcttttgtatcatcagtggcaagaaacgacaccggatactacacttgttcctcttcaaagcatcccagtcaatcagctttggttaccatcgtagaaaagggatttataaatgctaccaattcaagtgaagattatgaaattgaccaatatgaagagttttgtttttctgtcaggtttaaagcctacccacaaatcagatgtacgtggaccttctctcgaaaatcatttccttgtgagcaaaagggtcttgataacggatacagcatatccaagttttgcaatcataagcaccagccaggagaatatatattccatgcagaaaatgatgatgcccaatttaccaaaatgttcacgctgaatataagaaggaaacctcaagtgctcgcagaagcatcggcaagtcaggcgtcctgtttctcggatggatacccattaccatcttggacctggaagaagtgttcagacaagtctcccaactgcacagaagagatcacagaaggagtctggaatagaaaggctaacagaaaagtgtttggacagtgggtgtcgagcagtactctaaacatgagtgaagccataaaagggttcctggtcaagtgctgtgcatacaattcccttggcacatcttgtgagacgatccttttaaactctccaggccccttccctttcatccaagacaacatctcattctatgcaacaattggtgtttgtctcctcttcattgtcgttttaaccctgctaatttgtcacaagtacaaaaagcaatttaggtatgaaagccagctacagatggtacaggtgaccggctcctcagataatgagtacttctacgttgatttcagagaatatgaatatgatctcaaatgggagtttccaagagaaaatttagagtttgggaaggtactaggatcaggtgcttttggaaaagtgatgaacgcaacagcttatggaattagcaaaacaggagtctcaatccaggttgccgtcaaaatgctgaaagaaaaagcagacagctctgaaagagaggcactcatgtcagaactcaagatgatgacccagctgggaagccacgagaatattgtgaacctgctgggggcgtgcacactgtcaggaccaatttacttgatttttgaatactgttgctatggtgatcttctcaactatctaagaagtaaaagagaaaaatttcacaggacttggacagagattttcaaggaacacaatttcagtttttaccccactttccaatcacatccaaattccagcatgcctggttcaagagaagttcagatacacccggactcggatcaaatctcagggcttcatgggaattcatttcactctgaagatgaaattgaatatgaaaaccaaaaaaggctggaagaagaggaggacttgaatgtgcttacatttgaagatcttctttgctttgcatatcaagttgccaaaggaatggaatttctggaatttaagtcgtgtgttcacagagacctggccgccaggaacgtgcttgtcacccacgggaaagtggtgaagatatgtgactttggattggctcgagatatcatgagtgattccaactatgttgtcaggggcaatgcccgtctgcctgtaaaatggatggcccccgaaagcctgtttgaaggcatctacaccattaagagtgatgtctggtcatatggaatattactgtgggaaatcttctcacttggtgtgaatccttaccctggcattccggttgatgctaacttctacaaactgattcaaaatggatttaaaatggatcagccattttatgctacagaagaaatatacattataatgcaatcctgctgggcttttgactcaaggaaacggccatccttccctaatttgacttcgtttttaggatgtcagctggcagatgcagaagaagcgaaactgtggaaaatccctgagacaatgaaagcagttaaaattgcaccgcagagggaaaacccaccacagaggatgcctgggaaaaacaaggacaagggtaacacaaaggcagcaagaagtcctgggacactgcagaagttctgaagcaggagcagccacatggtgaaatcaacataagattaaatatgtatcagaatgtggatggccgtgtttcggaatgtcctcacacctaccaaaacaggcgacctttcagcagagagatggatttggggctactctctccgcaggctcaggtcgaagattcgtagaggaacaatttagttttaaggacttcatccctccacctatccctaacaggctgtagattaccaaaacaagattaatttcatcactaaaagaaaatctattatc

SEQ ID NO: 98 - protein, 1000 aa, Homo sapiens
MPALARDGGQLPLLVVFSAMIFGTITNQDLPVIKCVLINHKNNDSSVGKSSSYPMVSESPEDLGCALRPQSSGTVYERAAVEVDVSASITLQVLVDAPGNISCLWVFKHSSLNCQPHFDLQNRGVVSMVILKMTETQAGEYLLFIQSEATNYTILFTVSIRNTLLYTLRRPYFRKMENQDALVCISESVPEPIVEWVLCDSQGESCKEESPAVVKKEEKVLHELFGMDIRCCARNELGRECTRLFTIDLNQTPQTTLPQLFLKVGEPLWIRCKAVHVNHGFGLTWELENKALEEGNYFEMSTYSTNRTMIRILFAFVSSVARNDTGYYTCSSSKHPSQSALVTIVEKGFINATNSSEDYEIDQYEEFCFSVRFKAYPQIRCTWTFSRKSFPCEQKGLDNGYSISKFCNHKHQPGEYIFHAENDDAQFTKMFTLNIRRKPQVLAEASASQASCFSDGYPLPSWTWKKCSDKSPNCTEEITEGVWNRKANRKVFGQWVSSSTLNMSEAIKGFLVKCCAYNSLGTSCETILLNSPGPFPFIQDNISFYATIGVCLLFIVVLTLLICHKYKKQFRYESQLQMVQVTGSSDNEYFYVDFREYEYDLKWEFPRENLEFGKVLGSGAFGKVMNATAYGISKTGVSIQVAVKMLKEKADSSEREALMSELKMMTQLGSHENIVNLLGACTLSGPIYLIFEYCCYGDLLNYLRSKREKFHRTWTEIFKEHNFSFYPTFQSHPNSSMPGSREVQIHPDSDQISGLHGNSFHSEDEIEYENQKRLEEEEDLNVLTFEDLLCFAYQVAKGMEFLEFKSCVHRDLAARNVLVTHGKVVKICDFGLARDIMSDSNYVVRGNARLPVKWMAPESLFEGIYTIKSDVWSYGILLWEIFSLGVNPYPGIPVDANFYKLIQNGFKMDQPFYATEEIYIIMQSCWAFDSRKRPSFPNLTSFLGCQLADAEEAKLWKIPETMKAVKIAPQRENPPQRMPGKNKDKGNTKAARSPGTLQKF

SEQ ID NO: 99 - DNA, 5347 bp, Homo sapiens
  CDS (15)..(5228)
aaatcgaagcaaacatgtctggagaagtgcgtttgaggcagttggagcagtttattttggacgggcccgctcagaccaatgggcagtgcttcagtgtggagacattactggatatactcatctgcctttatgatgaatgcaataattctccattgagaagagagaagaacattctcgaatacctagaatggggtgctaaaccatttacttctaaagtgaaacaaatgcgattacatagagaagactttgaaatattaaaggtgattggtcgaggagcttttggggaggttgctgtagtaaaactaaaaaatgcagataaagtgtttgccatgaaaatattgaataaatgggaaatgctgaaaagagctgagacagcatgttttcgtgaagaaagggatgtattagtgaatggagacaataaatggattacaaccttgcactatgctttccaggatgacaataacttatacctggttatggattattatgttggtggggatttgcttactctactcagcaaatttgaagatagattgcctgaagatatggctagattttacttggctgagatggtgatagcaattgactcagttcatcagctacattatgtacacagagacattaaacctgacaatatactgatggatatgaatggacatattcggttagcagattttggttcttgtctgaagctgatggaagatggaacggttcagtcctcagtggctgtaggaactccagattatatctctcctgaaatccttcaagccatggaagatggaaaagggagatatggacctgaatgtgactggtggtctttgggggtctgtatgtatgaaatgctttacggagaaacaccattttatgcagaatcgctggtggagacatacggaaaaatcatgaaccacaaagagaggtttcagtttccagcccaagtgactgatgtgtctgaaaatgctaaggatcttattcgaaggctcatttgtagcagagaacatcgacttggtcaaaatggaatagaagactttaagaaacacccatttttcagtggaattgattgggataatattcggaactgtgaagcaccttatattccagaagttagtagcccaacagatacatcgaattttgatgtagatgatgattgtttaaaaaattctgaaacgatgcccccaccaacacatactgcattttctggccaccatctgccatttgttggttttacatatactagtagctgtgtactttctgatcggagctgtttaagagttacggctggtcccacctcactggatcttgatgttaatgttcagaggactctagacaacaacttagcaactgaagcttatgaaagaagaattaagcgccttgagcaagaaaaacttgaactcagtagaaaacttcaagagtcaacacagactgtccaagctctgcagtattcaactgttgatggtccactaacagcaagcaaagatttagaaataaaaaacttaaaagaagaaattgaaaaactaagaaaacaagtaacagaatcaagtcatttggaacagcaacttgaagaagctaatgctgtgaggcaagaactagatgatgcttttagacaaatcaaggcttatgaaaaacaaatcaaaacgttacaacaagaaagagaagatctaaataaggaactagtccaggctagtgagcgattaaaaaaccaatccaaagagctgaaagacgcacactgtcagaggaaactggccatgcaggaattcatggagatcaatgagcggctaacagaattgcacacccaaaaacagaaacttgctcgccatgtccgagataaggaagaagaggtggacctggtgatgcaaaaagttgaaagcttaaggcaagaactgcgcagaacagaaagagccaaaaaagagctggaagttcatacagaagctctagctgctgaagcatctaaagacaggaagctacgtgaacagagtgagcactattctaagcaactggaaaatgaattggagggactgaagcaaaaacaaattagttactcaccaggagtatgcagcatagaacatcagcaagagataaccaaactaaagactgatttggaaaagaaaagtatcttttatgaagaagaattatctaaaagagaaggaatacatgcaaatgaaataaaaaatcttaagaaagaactgcatgattcagaaggtcagcaacttgctctcaacaaagaaattatgattttaaaagacaaattggaaaaaaccagaagagaaagtcaaagtgaaagggaggaatttgaaagtgagttcaaacaacaatatgaacgagaaaaagtgttgttaactgaagaaaataaaaagctgacgagtgaacttgataagcttactactttgtatgagaacttaagtatacacaaccagcagttagaagaagaggttaaagatctagcagacaagaaagaatcagttgcacattgggaagcccaaatcacagaaataattcagtgggtcagcgatgaaaaggatgcacgatggtatcttcaggccttagcttctaaaatgactgaagaattggaggcattaagaaattccagcttgggtacacgagcaacagtaagcttctatgatatgccctggaaaatgcgtcgttttgcgaaactggatatgtcagctagactggagttgcagtcggctctggatgcagaaataagagccaaacaggccatccaagaagagttgaataaagttaaagcatctaatatcataacagaaaaactaaaagattcagagaagaagaacttggaactactctcagaaatcgaacagctgataaaggacactgaagagcttagatctgaaaagggtatggagcaccaagactcacagcattctttcttggcatttttgaatacgcctaccgatgctctggatcaatttgaatctccatcctgtactccagctagcaaaggcagacgtgtaagagactccactccactttcagttcacacaccaaccttaaggaaaaaaggatgtcctggttcaactggctttccacctaagcgcaagactcaccagttttttgtaaaatcttttactactcctaccaagtgtcatcagtgtacctccttgatggtgggtttaataagacagggctgttcatgtgaagtgtgtggattctcatgccatataacttgtgtaaacaaagctccaaccacttgtccagttcctcctgaacagacaaaaggtcccctgggtatagatcctcagaaaggaataggaacagcatatgaaggtcatgtcaggattcctaagccagctggagtgaagaaagggtggcagagagcactggctatagtgtgtgacttcaaactctttctgtacgatattgctgaaggaaaagcatctcagcccagtgttgtcattagtcaagtgattgacatgaggagggatgaagaattttctgtgagttcagtcttggcttctgatgttatccatgcaagtcggaaagatataccctgtatatttagggtcacagcttcccagctctcagcatctaataacaaatgttcaatcctgatgctagcagacactgagaatgagaagaataagtgggtgggagtgctgagtgaattgcacaagattttgaagaaaaacaaattcagagaccgctcagtctatgttcccaaagaggcttatgacagcactctacccctcattaaaacaacccaggcagccgcaatcatagatcatgaaagaattgctttgggaaacgaagaagggttatttgttgtacatgtcaccaaagatgaaattattagagttggtgacaataagaagattcatcagattgaactcattccaaatgatcagcttgttgctgtgatctcaggacgaaatcgtcatgtacgactttttcctatgtcagcattggatgggcgagagaccgatttttacaagctgtcagaaactaaagggtgtcaaaccgtaacttctggaaaggtgcgccatggagctctcacatgcctgtgtgtggctatgaaaaggcaggtcctctgttatgaactatttcagagcaagacccgtcacagaaaatttaaagaaattcaagtcccatataatgtccagtggatggcaatcttcagtgaacaactctgtgtgggattccagtcaggatttctaagataccccttgaatggagaaggaaatccatacagtatgctccattcaaatgaccatacactatcatttattgcacatcaaccaatggatgctatctgcgcagttgagatctccagtaaagaatatctgctgtgttttaacagcattgggatatacactgactgccagggccgaagatctagacaacaggaattgatgtggccagcaaatccttcctcttgttgtaagattctctacaatgcaccatatctctcggtgtacagtgaaaatgcagttgatatctttgatgtgaactccatggaatggattcagactcttcctctcaaaaaggtacgacccttaaacaatgaaggatcattaaatcttttagggttggagaccattagattaatatatttcaaaaataagatggcagaaggggacgaactggtagtacctgaaacatcagataatagtcggaaacaaatggttagaaacattaacaataagcggcgttattccttcagagtcccagaagaggaaaggatgcagcagaggagggaaatgctacgagatccagaaatgagaaataaattaatttctaatccaactaattttaatcacatagcacacatgggtcctggagatggaatacagatcctgaaagatctgcccatgaaccctcggcctcaggaaagtcggacagtattcagtggctcagtcagtattccatctatcaccaaatcccgccctgagccaggccgctccatgagtgctagcagtggcttgtcagcatcatccgcacagaatggcagcgcattaaagagggaattctctggaggaagctacagtgccaagcggcagcccatgccctccccgtcagagggctctttgtcctctggaggcatggaccaaggaagtgatgccccagcgagggactttgacggagaggactctgactctccgaggcattccacagcttccaacagttccaacctaagcagccccccaagcccagcttcaccccgaaaaaccaagagcctctccctggagagcactgaccgcgggagctgggacccgtgagctgcctcagcactgggacctctcgctctccgctccctgccactcgcctcctctcactttcatctcttccctccacctcgcctgctcggcctgaaagccaccaggggctggcagca

SEQ ID NO: 100 - protein, 1738 aa, Homo sapiens
MSGEVRLRQLEQFILDGPAQTNGQCFSVETLLDILICLYDECNNSPLRREKNILEYLEWGAKPFTSKVKQMRLHREDFEILKVIGRGAFGEVAVVKLKNADKVFAMKILNKWEMLKRAETACFREERDVLVNGDNKWITTLHYAFQDDNNLYLVMDYYVGGDLLTLLSKFEDRLPEDMARFYLAEMVIAIDSVHQLHYVHRDIKPDNILMDMNGHIRLADFGSCLKLMEDGTVQSSVAVGTPDYISPEILQAMEDGKGRYGPECDWWSLGVCMYEMLYGETPFYAESLVETYGKIMNHKERFQFPAQVTDVSENAKDLIRRLICSREHRLGQNGIEDFKKHPFFSGIDWDNIRNCEAPYIPEVSSPTDTSNFDVDDDCLKNSETMPPPTHTAFSGHHLPFVGFTYTSSCVLSDRSCLRVTAGPTSLDLDVNVQRTLDNNLATEAYERRIKRLEQEKLELSRKLQESTQTVQALQYSTVDGPLTASKDLEIKNLKEEIEKLRKQVTESSHLEQQLEEANAVRQELDDAFRQIKAYEKQIKTLQQEREDLNKELVQASERLKNQSKELKDAHCQRKLAMQEFMEINERLTELHTQKQKLARHVRDKEEEVDLVMQKVESLRQELRRTERAKKELEVHTEALAAEASKDRKLREQSEHYSKQLENELEGLKQKQISYSPGVCSIEHQQEITKLKTDLEKKSIFYEEELSKREGIHANEIKNLKKELHDSEGQQLALNKEIMILKDKLEKTRRESQSEREEFESEFKQQYEREKVLLTEENKKLTSELDKLTTLYENLSIHNQQLEEEVKDLADKKESVAHWEAQITEIIQWVSDEKDARWYLQALASKMTEELEALRNSSLGTRATVSFYDMPWKMRRFAKLDMSARLELQSALDAEIRAKQAIQEELNKVKASNIITEKLKDSEKKNLELLSEIEQLIKDTEELRSEKGMEHQDSQHSFLAFLNTPTDALDQFESPSCTPASKGRRVRDSTPLSVHTPTLRKKGCPGSTGFPPKRKTHQFFVKSFTTPTKCHQCTSLMVGLIRQGCSCEVCGFSCHITCVNKAPTTCPVPPEQTKGPLGIDPQKGIGTAYEGHVRIPKPAGVKKGWQRALAIVCDFKLFLYDIAEGKASQPSVVISQVIDMRRDEEFSVSSVLASDVIHASRKDIPCIFRVTASQLSASNNKCSILMLADTENEKNKWVGVLSELHKILKKNKFRDRSVYVPKEAYDSTLPLIKTTQAAAIIDHERIALGNEEGLFVVHVTKDEIIRVGDNKKIHQIELIPNDQLVAVISGRNRHVRLFPMSALDGRETDFYKLSETKGCQTVTSGKVRHGALTCLCVAMKRQVLCYELFQSKTRHRKFKEIQVPYNVQWMAIFSEQLCVGFQSGFLRYPLNGEGNPYSMLHSNDHTLSFIAHQPMDAICAVEISSKEYLLCFNSIGIYTDCQGRRSRQQELMWPANPSSCCKILYNAPYLSVYSENAVDIFDVNSMEWIQTLPLKKVRPLNNEGSLNLLGLETIRLIYFKNKMAEGDELVVPETSDNSRKQMVRNINNKRRYSFRVPEEERMQQRREMLRDPEMRNKLISNPTNFNHIAHMGPGDGIQILKDLPMNPRPQESRTVFSGSVSIPSITKSRPEPGRSMSASSGLSASSAQNGSALKREFSGGSYSAKRQPMPSPSEGSLSSGGMDQGSDAPARDFDGEDSDSPRHSTASNSSNLSSPPSPASPRKTKSLSLESTDRGSWDP

SEQ ID NO: 101 - DNA, 5875 bp, Homo sapiens
  CDS (15)..(5006)
aaatcgaagcaaacatgtctggagaagtgcgtttgaggcagttggagcagtttattttggacgggcccgctcagaccaatgggcagtgcttcagtgtggagacattactggatatactcatctgcctttatgatgaatgcaataattctccattgagaagagagaagaacattctcgaatacctagaatggggtgctaaaccatttacttctaaagtgaaacaaatgcgattacatagagaagactttgaaatattaaaggtgattggtcgaggagcttttggggaggttgctgtagtaaaactaaaaaatgcagataaagtgtttgccatgaaaatattgaataaatgggaaatgctgaaaagagctgagacagcatgttttcgtgaagaaagggatgtattagtgaatggagacaataaatggattacaaccttgcactatgctttccaggatgacaataacttatacctggttatggattattatgttggtggggatttgcttactctactcagcaaatttgaagatagattgcctgaagatatggctagattttacttggctgagatggtgatagcaattgactcagttcatcagctacattatgtacacagagacattaaacctgacaatatactgatggatatgaatggacatattcggttagcagattttggttcttgtctgaagctgatggaagatggaacggttcagtcctcagtggctgtaggaactccagattatatctctcctgaaatccttcaagccatggaagatggaaaagggagatatggacctgaatgtgactggtggtctttgggggtctgtatgtatgaaatgctttacggagaaacaccattttatgcagaatcgctggtggagacatacggaaaaatcatgaaccacaaagagaggtttcagtttccagcccaagtgactgatgtgtctgaaaatgctaaggatcttattcgaaggctcatttgtagcagagaacatcgacttggtcaaaatggaatagaagactttaagaaacacccatttttcagtggaattgattgggataatattcggaactgtgaagcaccttatattccagaagttagtagcccaacagatacatcgaattttgatgtagatgatgattgtttaaaaaattctgaaacgatgcccccaccaacacatactgcattttctggccaccatctgccatttgttggttttacatatactagtagctgtgtactttctgatcggagctgtttaagagttacggctggtcccacctcactggatcttgatgttaatgttcagaggactctagacaacaacttagcaactgaagcttatgaaagaagaattaagcgccttgagcaagaaaaacttgaactcagtagaaaacttcaagagtcaacacagactgtccaagctctgcagtattcaactgttgatggtccactaacagcaagcaaagatttagaaataaaaaacttaaaagaagaaattgaaaaactaagaaaacaagtaacagaatcaagtcatttggaacagcaacttgaagaagctaatgctgtgaggcaagaactagatgatgcttttagacaaatcaaggcttatgaaaaacaaatcaaaacgttacaacaagaaagagaagatctaaataaggaactagtccaggctagtgagcgattaaaaaaccaatccaaagagctgaaagacgcacactgtcagaggaaactggccatgcaggaattcatggagatcaatgagcggctaacagaattgcacacccaaaaacagaaacttgctcgccatgtccgagataaggaagaagaggtggacctggtgatgcaaaaagttgaaagcttaaggcaagaactgcgcagaacagaaagagccaaaaaagagctggaagttcatacagaagctctagctgctgaagcatctaaagacaggaagctacgtgaacagagtgagcactattctaagcaactggaaaatgaattggagggactgaagcaaaaacaaattagttactcaccaggagtatgcagcatagaacatcagcaagagataaccaaactaaagactgatttggaaaagaaaagtatcttttatgaagaagaattatctaaaagagaaggaatacatgcaaatgaaataaaaaatcttaagaaagaactgcatgattcagaaggtcagcaacttgctctcaacaaagaaattatgattttaaaagacaaattggaaaaaaccagaagagaaagtcaaagtgaaagggaggaatttgaaagtgagttcaaacaacaatatgaacgagaaaaagtgttgttaactgaagaaaataaaaagctgacgagtgaacttgataagcttactactttgtatgagaacttaagtatacacaaccagcagttagaagaagaggttaaagatctagcagacaagaaagaatcagttgcacattgggaagcccaaatcacagaaataattcagtgggtcagcgatgaaaaggatgcacgatggtatcttcaggccttagcttctaaaatgactgaagaattggaggcattaagaaattccagcttgggtacacgagcaacagtaagcttctatgatatgccctggaaaatgcgtcgttttgcgaaactggatatgtcagctagactggagttgcagtcggctctggatgcagaaataagagccaaacaggccatccaagaagagttgaataaagttaaagcatctaatatcataacagaaaaactaaaagattcagagaagaagaacttggaactactctcagaaatcgaacagctgataaaggacactgaagagcttagatctgaaaagggtatggagcaccaagactcacagcattctttcttggcatttttgaatacgcctaccgatgctctggatcaatttgaatctccatcctgtactccagctagcaaaggcagacgtgtaagagactccactccactttcagttcacacaccaaccttaaggaaaaaaggatgtcctggttcaactggctttccacctaagcgcaagactcaccagttttttgtaaaatcttttactactcctaccaagtgtcatcagtgtacctccttgatggtgggtttaataagacagggctgttcatgtgaagtgtgtggattctcatgccatataacttgtgtaaacaaagctccaaccacttgtccagttcctcctgaacagacaaaaggtcccctgggtatagatcctcagaaaggaataggaacagcatatgaaggtcatgtcaggattcctaagccagctggagtgaagaaagggtggcagagagcactggctatagtgtgtgacttcaaactctttctgtacgatattgctggaggaaaagcatctcagcccagtgttgtcattagtcaagtgattgacatgagggatgaagaattttctgtgagttcagtcttggcttctgatgttatccatgcaagtcggaaagatataccctgtatatttagggtcacagcttcccagctctcagcatctaataacaaatgttcaatcctgatgctagcagacactgagaatgagaagaataagtgggtgggagtgctgagtgaattgcacaagattttgaagaaaaacaaattcagagaccgctcagtctatgttcccaaagaggcttatgacagcactctacccctcattaaaacaacccaggcagccgcaatcatagatcatgaaagaattgctttgggaaacgaagaagggttatttgttgtacatgtcaccaaagatgaaattattagagttggtgacaataagaagattcatcagattgaactcattccaaatgatcagcttgttgctgtgatctcaggacgaaatcgtcatgtacgactttttcctatgtcagcattggatgggcgagagaccgatttttacaagctgtcagaaactaaagggtgtcaaaccgtaacttctggaaaggtgcgccatggagctctcacatgcctgtgtgtggctatgaaaaggcaggtcctctgttatgaactatttcagagcaagacccgtcacagaaaatttaaagaaattcaagtcccatataatgtccagtggatggcaatcttcagtgaacaactctgtgtgggattccagtcaggatttctaagataccccttgaatggagaaggaaatccatacagtatgctccattcaaatgaccatacactatcatttattgcacatcaaccaatggatgctatctgcgcagttgagatctccagtaaagaatatctgctgtgttttaacagcattgggatatacactgactgccagggccgaagatctagacaacaggaattgatgtggccagcaaatccttcctcttgttgttacaatgcaccatatctctcggtgtacagtgaaaatgcagttgatatctttgatgtgaactccatggaatggattcagactcttcctctcaaaaaggttcgacccttaaacaatgaaggatcattaaatcttttagggttggagaccattagattaatatatttcaaaaataagatggcagaaggggacgaactggtagtacctgaaacatcagataatagtcggaaacaaatggttagaaacattaacaataagcggcgttattccttcagagtcccagaagaggaaaggatgcagcagaggagggaaatgctacgagatccagaaatgagaaataaattaatttctaatccaactaattttaatcacatagcacacatgggtcctggagatggaatacagatcctgaaagatctgcccatgaaccctcggcctcaggaaagtcggacagtattcagtggctcagtcagtattccatctatcaccaaatcccgccctgagccaggccgctccatgagtgctagcagtggcttgtcagcaagtaagtgccggggctacaggaaggtgcctctgagacagggtgacccccagctccctcccctcctgtcccgtgggtgacatgtccttcacttacgtgtgcccattgcattctcaagtggctgcagtgtctcagaccctgctgggtaatgcctaataggcacaaatgcagttgttaagaaaatagtcccagagtccttctagagtgtacaggccatctgggagacagacaaatatgattacaaattgtgatgataaaggctctgaaggaagtaaacagcatacattaatagagaataacaaggggtagctgttagggatgaatccctacttggcagaataattaggaaaatcactccctagaggtggagtcatgtttgagtaatgtttggttaactgaaagaaggctagtatggctacatggtagtggtgaggaagtaacaaaaattagagcggggtagcaggtaagggtcagaccagcagggacttgaagaccaaggtaagacattttttactttattcaaaaggaaaaggaagacttttaagtagggaagaattttctttcaatttacattcttaaaacaatcctgcgggctgccaagtggagaatggactagaggcaggaagagtggaagccagcatccagataggagactcctagagtggtcccaatggaaaccaatgagggcttgggatgcagcaggggcagaaggagagaagatggtagattctccagatatattttcagagttaaaagcagtaagacttgatgatgaattagtcatggaaaagtaagggagagagttaaagatgactcccagacttcctgctagggccttagtatgataccatttactcccatttaccaccgtttaagaaggggctgaggcaggacattccacgcatgtccaaaggtcccgaggtagcaaaaaaaaaaaaaaaaaaaa

SEQ ID NO: 102 - protein, 1664 aa, Homo sapiens
MSGEVRLRQLEQFILDGPAQTNGQCFSVETLLDILICLYDECNNSPLRREKNILEYLEWGAKPFTSKVKQMRLHREDFEILKVIGRGAFGEVAVVKLKNADKVFAMKILNKWEMLKRAETACFREERDVLVNGDNKWITTLHYAFQDDNNLYLVMDYYVGGDLLTLLSKFEDRLPEDMARFYLAEMVIAIDSVHQLHYVHRDIKPDNILMDMNGHIRLADFGSCLKLMEDGTVQSSVAVGTPDYISPEILQAMEDGKGRYGPECDWWSLGVCMYEMLYGETPFYAESLVETYGKIMNHKERFQFPAQVTDVSENAKDLIRRLICSREHRLGQNGIEDFKKHPFFSGIDWDNIRNCEAPYIPEVSSPTDTSNFDVDDDCLKNSETMPPPTHTAFSGHHLPFVGFTYTSSCVLSDRSCLRVTAGPTSLDLDVNVQRTLDNNLATEAYERRIKRLEQEKLELSRKLQESTQTVQALQYSTVDGPLTASKDLEIKNLKEEIEKLRKQVTESSHLEQQLEEANAVRQELDDAFRQIKAYEKQIKTLQQEREDLNKELVQASERLKNQSKELKDAHCQRKLAMQEFMEINERLTELHTQKQKLARHVRDKEEEVDLVMQKVESLRQELRRTERAKKELEVHTEALAAEASKDRKLREQSEHYSKQLENELEGLKQKQISYSPGVCSIEHQQEITKLKTDLEKKSIFYEEELSKREGIHANEIKNLKKELHDSEGQQLALNKEIMILKDKLEKTRRESQSEREEFESEFKQQYEREKVLLTEENKKLTSELDKLTTLYENLSIHNQQLEEEVKDLADKKESVAHWEAQITEIIQWVSDEKDARWYLQALASKMTEELEALRNSSLGTRATVSFYDMPWKMRRFAKLDMSARLELQSALDAEIRAKQAIQEELNKVKASNIITEKLKDSEKKNLELLSEIEQLIKDTEELRSEKGMEHQDSQHSFLAFLNTPTDALDQFESPSCTPASKGRRVRDSTPLSVHTPTLRKKGCPGSTGFPPKRKTHQFFVKSFTTPTKCHQCTSLMVGLIRQGCSCEVCGFSCHITCVNKAPTTCPVPPEQTKGPLGIDPQKGIGTAYEGHVRIPKPAGVKKGWQRALAIVCDFKLFLYDIAGGKASQPSVVISQVIDMRDEEFSVSSVLASDVIHASRKDIPCIFRVTASQLSASNNKCSILMLADTENEKNKWVGVLSELHKILKKNKFRDRSVYVPKEAYDSTLPLIKTTQAAAIIDHERIALGNEEGLFVVHVTKDEIIRVGDNKKIHQIELIPNDQLVAVISGRNRHVRLFPMSALDGRETDFYKLSETKGCQTVTSGKVRHGALTCLCVAMKRQVLCYELFQSKTRHRKFKEIQVPYNVQWMAIFSEQLCVGFQSGFLRYPLNGEGNPYSMLHSNDHTLSFIAHQPMDAICAVEISSKEYLLCFNSIGIYTDCQGRRSRQQELMWPANPSSCCYNAPYLSVYSENAVDIFDVNSMEWIQTLPLKKVRPLNNEGSLNLLGLETIRLIYFKNKMAEGDELVVPETSDNSRKQMVRNINNKRRYSFRVPEEERMQQRREMLRDPEMRNKLISNPTNFNHIAHMGPGDGIQILKDLPMNPRPQESRTVFSGSVSIPSITKSRPEPGRSMSASSGLSASKCRGYRKVPLRQGDPQLPPLLSRG

SEQ ID NO: 103 - DNA, 874 bp, Homo sapiens
  CDS (2)..(874)
caccggatccaaaacaacccaggcagccgcaatcatagatcatgaaagaattgctttgggaaacgaagaagggttatttgttgtacatgtcaccaaagatgaaattattagagttggtgacaataagaagattcatcagattgaactcattccaaatgatcagcttgttgctgtgatctcaggacgaaatcgtcatgtacgactttttcctatgtcagcattggatgggcgagagaccgatttttacaagctgtcagaaactaaagggtgtcaaaccgtaacttctggaaaggtgcgccatggagctctcacatgcctgtgtgtggctatgaaaaggcaggtcctctgttatgaactatttcagagcaagacccgtcacagaaaatttaaagaaattcaagtcccatataatgtccagtggatggcaatcttcagtgaacaactctgtgtgggattccagtcaggatttctaagataccccttgaatggagaaggaaatccatacagtatgctccattcaaatgaccatacactatcatttattgcacatcaaccaatggatgctatctgcgcagttgagatctccagtaaagaatatctgctgtgttttaacagcattgggatatacactgactgccagggccgaagatctagacaacaggaattgatgtggccagcaaatccttcctcttgttgttacaatgcaccatatctctcggtgtacagtgaaaatgcagttgatatctttgatgtgaactccatggaatggattcagactcttcctctcaaaaaggttcgacccttaaacaatgaaggatcattaaatcttttagggttggagaccattagattaatatatttcaaactcgagggc

SEQ ID NO: 104 - protein, 291 aa, Homo sapiens
TGSKTTQAAAIIDHERIALGNEEGLFVVHVTKDEIIRVGDNKKIHQIELIPNDQLVAVISGRNRHVRLFPMSALDGRETDFYKLSETKGCQTVTSGKVRHGALTCLCVAMKRQVLCYELFQSKTRHRKFKEIQVPYNVQWMAIFSEQLCVGFQSGFLRYPLNGEGNPYSMLHSNDHTLSFIAHQPMDAICAVEISSKEYLLCFNSIGIYTDCQGRRSRQQELMWPANPSSCCYNAPYLSVYSENAVDIFDVNSMEWIQTLPLKKVRPLNNEGSLNLLGLETIRLIYFKLEG

SEQ ID NO: 105 - DNA, 3117 bp, Homo sapiens
  CDS (61)..(2811)
taggagtgaacactgcacaggaatctctgcccatctcaggagaaaccaaacttggggaaaatgtttgcggtccacttgatggcattttacttcagcaagctgaaggaggaccagatcaagaaggtggacaggttcctgtatcacatgcggctctccgatgacacccttttggacatcatgaggcggttccgggctgagatggagaagggcctggcaaaggacaccaaccccacggctgcagtgaagatgttgcccaccttcgtcagggccattcccgatggttccgaaaatggggagttcctttccctggatctcggagggtccaagttccgagtgctgaaggtgcaagtcgctgaagaggggaagcgacacgtgcagatggagagtcagttctacccaacgcccaatgaaatcatccgcgggaacggcacagagctgtttgaatatgtagctgactgtctggcagatttcatgaagaccaaagatttaaagcataagaaattgccccttggcctaactttttctttcccctgtcgacagactaaactggaagagggtgtcctactttcgtggacaaaaaagtttaaggcacgaggagttcaggacacggatgtggtgagccgtctgaccaaagccatgagaagacacaaggacatggacgtggacatcctggccctggtcaatgacaccgtggggaccatgatgacctgtgcctatgacgacccctactgcgaagttggtgtcatcatcggaactggcaccaatgcgtgttacatggaggacatgagcaacattgacctggtggagggcgacgagggcaggatgtgcatcaacacagagtggggggccttcggggacgacggggccctggaggacattcgcactgagttcgacagggagctggacctcggctctctcaacccaggaaagcaactgttcgagaagatgatcagtggcctgtacctgggggagcttgtcaggcttatcttgctgaagatggccaaggctggcctcctgtttggtggtgagaaatcttctgctctccacactaagggcaagatcgaaacacggcacgtggctgccatggagaagtataaagaaggccttgctaatacaagagagatcctggtggacctgggtctggaaccgtctgaggctgactgcattgccgtccagcatgtctgtaccatcgtctccttccgctcggccaatctctgtgcagcagctctggcggccatcctgacacgcctccgggagaacaagaaggtggaacggctccggaccacagtgggcatggacggcaccctctacaagatacaccctcagtacccaaaacgcctgcacaaggtggtgaggaaactggtcccaagctgtgatgtccgcttcctcctgtcagagagtggcagcaccaagggggccgccatggtgaccgcggtggcctcccgcgtgcaggcccagcggaagcagatcgacagggtgctggctttgttccagctgacccgagagcagctcgtggacgtgcaggccaagatgcgggctgagctggagtatgggctgaagaagaagagccacgggctggccacggtcaggatgctgcccacctacgtctgcgggctgccggacggcacagagaaaggaaagtttctcgccctggatcttgggggaaccaacttccgggtcctcctggtgaagatcagaagtggacggaggtcagtgcgaatgtacaacaagatcttcgccatccccctggagatcatgcagggcactggtgaggagctctttgatcacattgtgcagtgcatcgccgacttcctggactacatgggcctcaagggagcctccctacctttgggcttcacattctcatttccctgcaggcagatgagcattgacaagggaacactcatagggtggaccaaaggtttcaaggccactgactgtgaaggggaggacgtggtggacatgctcagggaagccatcaagaggagaaacgagtttgacctggacattgttgcagtcgtgaatgatacagtggggaccatgatgacctgtggctatgaagatcctaattgtgagattggcctgattgcaggaacaggcagcaacatgtgctacatggaggacatgaggaacatcgagatggtggaggggggtgaagggaagatgtgcatcaatacagagtggggaggatttggagacaatggctgcatagatgacatctggacccgatacgacacggaggtggatgaggggtccttgaatcctggcaagcagagatacgagaaaatgaccagtgggatgtacttgggggagattgtgcggcagatcctgatcgacctgaccaagcagggtctcctcttccgagggcagatttcagagcgtctccggaccaggggcatcttcgaaaccaagttcctgtcccagatcgaaagcgatcggctggcccttctccaggtcaggaggattctgcagcagctgggcctggacagcacgtgtgaggacagcatcgtggtgaaggaggtgtgcggacgcgtgtcccggcgggcggcccagctctgcggtgctggcctggccgctatagtggaaaaaaggagagaagaccaggggctagagcacctgaggatcactgtgggtgtggacggcaccctgtacaagctgcaccctcacttttctagaatattgcaggaaactgtgaaggaactagcccctcgatgtgatgtgacattcatgctgtcagaagatggcagtggaaaaggggcagcactgatcactgctgtggccaagaggttacagcaggcacagaaggagaactaggaacccctgggattggacctgatgcatcttggatactgaacagcttttcctctggcagatcagttggtcagagagcaatgggcaccctcctggctgacctcaccttctggatggccgaaagagaaccccaggttctcgggtactcttagtatcttgtactggatttgcagtgacattacatgacatctctatttggtatatttgggccaaaatgggccaacttatgaaatcaaagtgtctgtcctgagagatcccctttcaacacattgttcaggtgaggcttgagctgtcaattctctatgg

SEQ ID NO: 106 - protein, 917 aa, Homo sapiens
MFAVHLMAFYFSKLKEDQIKKVDRFLYHMRLSDDTLLDIMRRFRAEMEKGLAKDTNPTAAVKMLPTFVRAIPDGSENGEFLSLDLGGSKFRVLKVQVAEEGKRHVQMESQFYPTPNEIIRGNGTELFEYVADCLADFMKTKDLKHKKLPLGLTFSFPCRQTKLEEGVLLSWTKKFKARGVQDTDVVSRLTKAMRRHKDMDVDILALVNDTVGTMMTCAYDDPYCEVGVIIGTGTNACYMEDMSNIDLVEGDEGRMCINTEWGAFGDDGALEDIRTEFDRELDLGSLNPGKQLFEKMISGLYLGELVRLILLKMAKAGLLFGGEKSSALHTKGKIETRHVAAMEKYKEGLANTREILVDLGLEPSEADCIAVQHVCTIVSFRSANLCAAALAAILTRLRENKKVERLRTTVGMDGTLYKIHPQYPKRLHKVVRKLVPSCDVRFLLSESGSTKGAAMVTAVASRVQAQRKQIDRVLALFQLTREQLVDVQAKMRAELEYGLKKKSHGLATVRMLPTYVCGLPDGTEKGKFLALDLGGTNFRVLLVKIRSGRRSVRMYNKIFAIPLEIMQGTGEELFDHIVQCIADFLDYMGLKGASLPLGFTFSFPCRQMSIDKGTLIGWTKGFKATDCEGEDVVDMLREAIKRRNEFDLDIVAVVNDTVGTMMTCGYEDPNCEIGLIAGTGSNMCYMEDMRNIEMVEGGEGKMCINTEWGGFGDNGCIDDIWTRYDTEVDEGSLNPGKQRYEKMTSGMYLGEIVRQILIDLTKQGLLFRGQISERLRTRGIFETKFLSQIESDRLALLQVRRILQQLGLDSTCEDSIVVKEVCGRVSRRAAQLCGAGLAAIVEKRREDQGLEHLRITVGVDGTLYKLHPHFSRILQETVKELAPRCDVTFMLSEDGSGKGAALITAVAKRLQQAQKEN

SEQ ID NO: 107 - DNA, 2277 bp, Homo sapiens
  CDS (61)..(2268)
taggagtgaacactgcacaggaatctctgcccatctcaggagaaaccaaacttggggaaaatgtttgcggtccacttgatggcattttacttcagcaagctgaaggaggaccagatcaagaaggtggacaggttcctgtatcacatgcggctctccgatgacacccttttggacatcatgaggcggttccgggctgagatggagaagggcctggcaaaggacaccaaccccacggctgcagtgaagatgttgcccaccttcgtcagggccattcccgatggttccgaaaatggggagttcctttccctggatctcggagggtccaagttccgagtgctgaaggtgcaagtcgctgaagaggggaagcgacacgtgcagatggagagtcagttctacccaacgcccaatgaaatcatccgcgggaacggcacagagctgtttgaatatgtagctgactgtctggcagatttcatgaagaccaaagatttaaagcataagaaattgccccttggcctaactttttctttcccctgtcgacagactaaactggaagagggtgtcctactttcgtggacaaaaaagtttaaggcacgaggagttcaggacacggatgtggtgagccgtctgaccaaagccatgagaagacacaaggacatggacgtggacatcctggccctggtcaatgacaccgtggggaccatgatgacctgtgcctatgacgacccctactgcgaagttggtgtcatcatcggaactggcaccaatgcgtgttacatggaggacatgagcaacattgacctggtggagggcgacgagggcaggatgtgcatcaacacagagtggggggccttcggggacgacggggccctggaggacattcgcactgagttcgacagggagctggacctcggctctctcaacccaggaaagcaactgttcgagaagatgatcagtggcctgtacctgggggagcttgtcaggcttatcttgctgaagatggccaaggctggcctcctgtttggtggtgagaaatcttctgctctccacactaagggcaagatcgaaacacggcacgtggctgccatggagaagtataaagaaggccttgctaatacaagagagatcctggtggacctgggtctggaaccgtctgaggctgactgcattgccgtccagcatgtctgtaccatcgtctccttccgctcggccaatctctgtgcagcagctctggcggccatcctgacacgcctccgggagaacaagaaggtggaacggctccggaccacagtgggcatggacggcaccctctacaagatacaccctcagtacccaaaacgcctgcacaaggtggtgaggaaactggtcccaagctgtgatgtccgcttcctcctgtcagagagtggcagcaccaagggggccgccatggtgaccgcggtggcctcccgcgtgcaggcccagcggaagcagatcgacagggtgctggctttgttccagctgacccgagagcagctcgtggacgtgcaggccaagatgcgggctgagctggagtatgggctgaagaagaagagccacgggctggccacggtcaggatgctgcccacctacgtctgcgggctgccggacggcacagagaaaggaaagtttctcgccctggatcttgggggaaccaacttccgggtcctcctggtgaagatcagaagtggacggaggtcagtgcgaatgtacaacaagatcttcgccatccccctggagatcatgcagggcactggtgaggagctctttgatcacattgtgcagtgcatcgccgacttcctggactacatgggcctcaagggagcctccctacctttgggcttcacattctcatttccctgcaggcagatgagcattgacaagggaacactcatagggtggaccaaaggtttcaaggccactgactgtgaaggggaggacgtggtggacatgctcagggaagccatcaagaggagaaacgagtttgacctggacattgttgcagtcgtgaatgatacagtggggaccatgatgacctgtggctatgaagatcctaattgtgagattggcctgattgcaggaacaggcagcaacatgtgctacatggaggacatgaggaacatcgagatggtggaggggggtgaagggaagatgtgcatctgtttttcattttgcctgtggtttgtgttgcaggtgttgatagttgttttaaggattgttaggtataggaaatccagtaaattaataaaaaaattttgattttcc

SEQ ID NO: 108 - protein, 736 aa, Homo sapiens
MFAVHLMAFYFSKLKEDQIKKVDRFLYHMRLSDDTLLDIMRRFRAEMEKGLAKDTNPTAAVKMLPTFVRAIPDGSENGEFLSLDLGGSKFRVLKVQVAEEGKRHVQMESQFYPTPNEIIRGNGTELFEYVADCLADFMKTKDLKHKKLPLGLTFSFPCRQTKLEEGVLLSWTKKFKARGVQDTDVVSRLTKAMRRHKDMDVDILALVNDTVGTMMTCAYDDPYCEVGVIIGTGTNACYMEDMSNIDLVEGDEGRMCINTEWGAFGDDGALEDIRTEFDRELDLGSLNPGKQLFEKMISGLYLGELVRLILLKMAKAGLLFGGEKSSALHTKGKIETRHVAAMEKYKEGLANTREILVDLGLEPSEADCIAVQHVCTIVSFRSANLCAAALAAILTRLRENKKVERLRTTVGMDGTLYKIHPQYPKRLHKVVRKLVPSCDVRFLLSESGSTKGAAMVTAVASRVQAQRKQIDRVLALFQLTREQLVDVQAKMRAELEYGLKKKSHGLATVRMLPTYVCGLPDGTEKGKFLALDLGGTNFRVLLVKIRSGRRSVRMYNKIFAIPLEIMQGTGEELFDHIVQCIADFLDYMGLKGASLPLGFTFSFPCRQMSIDKGTLIGWTKGFKATDCEGEDVVDMLREAIKRRNEFDLDIVAVVNDTVGTMMTCGYEDPNCEIGLIAGTGSNMCYMEDMRNIEMVEGGEGKMCICFSFCLWFVLQVLIVVLRIVRYRKSSKLIKKF

SEQ ID NO: 109 - DNA, 767 bp, Homo sapiens
  CDS (61)..(750)
tgaactgaaaatcagaatcctgggcctcactcccagaggatctgatctacatgtgtggagatgcccaggaatctgctttattctcttttgtcctcccacctgtccccccatttcagcacctcggtaacctctgccaaagtggctgtgaatggcgttcagctgcattaccagcagactggagagggagatcacgcagtcctgctacttcctgggatgttaggaagtggagagactgattttggacctcagctcaagaacctcaataagaagctcttcacggtggtcgcctgggatcctcgaggctatggacattccaggcccccagatcgcgatttcccagcagacttttttgaaagggatgcaaaagatgctgttgatttgatgaaggcgctgaagtttaagaaggtttctctgctggggtggagtgatgggggcataaccgcactcattgctgctgcaaaatatccatcttacatccacaagatggtgatctggggcgccaacgcctacgtcactgacgaagacagcatgatatatgagggtaacatctgccggcacctgctgccccgggtccagtgccccgccttgattgtgcacggtgagaaggatcctctggtcccacggtttcatgccgacttcattcataagcacgtgaaaggctcacggctgcatttgatgccagaaggcaaacacaacctgcatttgcgttttgcagatgaattcaacaagttagcagaagacttcctacaatgagaatgcacactctc

SEQ ID NO: 110 - protein, 230 aa, Homo sapiens
MPRNLLYSLLSSHLSPHFSTSVTSAKVAVNGVQLHYQQTGEGDHAVLLLPGMLGSGETDFGPQLKNLNKKLFTVVAWDPRGYGHSRPPDRDFPADFFERDAKDAVDLMKALKFKKVSLLGWSDGGITALIAAAKYPSYIHKMVIWGANAYVTDEDSMIYEGNICRHLLPRVQCPALIVHGEKDPLVPRFHADFIHKHVKGSRLHLMPEGKHNLHLRFADEFNKLAEDFLQ

SEQ ID NO: 111 - DNA, 953 bp, Homo sapiens
  CDS (64)..(606)
atggaactgaaaattcagaatcctgggcctcactcccagaggatctgatctacatgtgtggagatgcccaggaatctgctttattctcttttgtcctcccacctgtccccccatttcagcacctcggtaacctctgccaaagtggctgtgaatggcgttcagctgcattaccagcagactggagagggagatcacgcagtcctgctacttcctgggatgttaggaagtggagagactgattttggacctcagctcaagaacctcaataagaagctcttcacggtggtcgcctgggatcctcgaggctatggacattccaggcccccagatcgcgatttcccagcagacttttttgaaagggatgcaaaagatgctgttgatttgatgaaggcgctgaagtttaagaaggtttctctgctggggtggagtgatgggggcataaccgcactcattgctgctgcaaaatatccatcttacatccacaagatggtgatctggggcgccaacgcctacgtcactgacgaagacagcatgatatatgagggcatccgagatgtttccaaatggagtgagagaacaagaaagcctctagaagccctctatgggtaacatctgccggcacctgctgccccgggtccagtgccccgccttgattgtgcacggtgagaaggatcctctggtcccacggtttcatgccgacttcattcataagcacgtgaaaggctcacggtttggatggcgtcagaaggaatgcctgaagaagtgatatgccatgttgctgcccagtttcacactggaagagatcctgtgcaaagatccagcggcctgctttgggttccagtaaacacaaaagctgcatttgatgccagaaggcaaacacaacctgcatttgcgttttgcagatgaattcaacaagttagcagaagacttcctacaatgagaatgcacactcc

SEQ ID NO: 112 - protein, 181 aa, Homo sapiens
MPRNLLYSLLSSHLSPHFSTSVTSAKVAVNGVQLHYQQTGEGDHAVLLLPGMLGSGETDFGPQLKNLNKKLFTVVAWDPRGYGHSRPPDRDFPADFFERDAKDAVDLMKALKFKKVSLLGWSDGGITALIAAAKYPSYIHKMVIWGANAYVTDEDSMIYEGIRDVSKWSERTRKPLEALYG

SEQ ID NO: 113 - DNA, 828 bp, Homo sapiens
  CDS (62)..(604)
ggaactgaaaattcagaatcctgggcctcactcccagaggatctgatctacatgtgtggagatgcccaggaatctgctttattctcttttgtcctcccacctgtccccccatttcggcacctcggtaacctctgccaaagtggctgtgaatggcgttcagctgcattaccagcagactggagagggagatcacgcagtcctgctacttcctgggatgttaggaagtggagagactgattttggacctcagctcaagaacctcaataagaagctcttcacagtggtcgcctgggatcctcgaggctatggacattccaggcccccagatcgcgatttcccagcagacttttttgaaagggatgcaaaagatgctgttgatttgatgaaggcgctgaagtttaagaaggtttctctgctggggtggagtgatgggggcataaccgcactcattgctgctgcaaaatatccatcttacatccacaagatggtgatctggggcgccaacgcctacgtcactgacgaagacagcatgatatatgagggcatccgagatgtttccaaatggagtgagagaacaagaaagcctctagaagccctctatgggtaacatctgccggcacctgctgccccgggtccagtgccccgccttgattgtgcacggtgaggaggatcctctggtcccacggtttcatgccgacttcattcataagcacgtgaaaggctcacggctgcatttgatgccagaaggcaaacacaacctgcatttgcgttttgcagatgaattcaacaagttagcagaagacttcctacaatgagaatgcacactcc

SEQ ID NO: 114 - protein, 181 aa, Homo sapiens
MPRNLLYSLLSSHLSPHFGTSVTSAKVAVNGVQLHYQQTGEGDHAVLLLPGMLGSGETDFGPQLKNLNKKLFTVVAWDPRGYGHSRPPDRDFPADFFERDAKDAVDLMKALKFKKVSLLGWSDGGITALIAAAKYPSYIHKMVIWGANAYVTDEDSMIYEGIRDVSKWSERTRKPLEALYG

SEQ ID NO: 115 - DNA, 1028 bp, Homo sapiens
  CDS (62)..(604)
ggaactgaaaattcagaatcctgggcctcactcccagaggatctgatctacatgtgtggagatgcccaggaatctgctttattctcttttgtcctcccacctgtccccccatttcagcacctcggtaacctctgccaaagtggctgtgaatggcgttcagctgcattaccagcagactggagagggagatcacgcagtcctgctacttcctgggatgttaggaagtggagagactgattttggacctcagctcaagaacctcaataagaagctcttcacggtggtcgcctgggatcctcgaggctatggacattccaggcccccagatcgcgatttcccagcagacttttttgaaagggatgcaaaagatgctgttgatttgatgaaggcgctgaagtttaagaaggtttctctgctggggtggagtgatgggggcataaccgcactcattgctgctgcaaaatatccatcttacatccacaagatggtgatctggggcgccaacgcctacgtcactgacgaagacagcatgatatatgagggcatccgagatgtttccaaatggagtgagagaacaagaaagcctctagaagccctctatgggtaacatctgccggcacctgctgccccgggtccagtgccccgccttgattgtgcacggtgagaaggatcctctggtcccacggtttcatgtcgacttcattcataagcacgtgaaaggctcacggtggggctttctagaagaagcagaatgaaaaaggaaaatatttagtttctgaataaaaaggggctattggcaaccaggtttggatggcgtcagaaggaatgcctgaagaagtgatatgccatgttgctgcccagtttcacactggaagagatcctgtgcaaagatccagcggcctgctttgggttccagtaaacacaaaagctgcatttgatgccagaaggcaaacacaacctgcatttgcgttttgcagatgaattcaacaagttagcagaagacttcctacaatgagaatgcacactcc

SEQ ID NO: 116 - protein, 181 aa, Homo sapiens; identical to SEQ ID NO: 112

SEQ ID NO: 117 - DNA, 1218 bp, Homo sapiens
  CDS (41)..(1171)
gcggcggctgcccggcggcccgggcgcgcggcgcttcgccatgtacaccttcgtggtacgcgatgagaacagcagcgtctacgccgaggtctcccggctgctcctcgccaccggccactggaagaggctgcggcgagacaaccccagattcaacctgatgctgggagagaggaatcggctgcccttcgggagactgggtcacgagcccgggctggtacagttggtgaattactacaggggtgctgacaaactgtgtcgcaaagcttctttagtgaagctaatcaagacaagccctgaactggctgagtcctgcacatggttccctgaatcttatgtgatttatccaaccaatctcaagactccagttgctccagcacagaatggaattcagccaccaatcagtaactcaaggacagatgaaagagaattctttctcgcctcttataacagaaagaaagaggatggagagggcaacgtttggattgcaaagtcatcagccggtgccaaaggtgagggcattctcatctcctcagaggcttcagagcttctcgatttcatagacaaccagggccaagtgcacgtgatccagaaatatcttgagcaccctctgctgcttgagccaggtcatcgcaagtttgacattcgaagctgggtcttggtggatcatcagtataatatctacctctatagagagggtgtgcttcggactgcttcagaaccatatcatgttgataatttccaagacaaaacctgccatttgaccaatcactgcattcaaaaagagtattcaaagaactacgggaagtatgaagaaggaaatgaaatgttcttcaaggagttcaatcagtacctaacaagtgctttgaacattaccctagaaagtagtatcttactacaaatcaaacatataatcaggaactgcctcctgagcgtggagcctgccattagcaccaagcacctcccttaccagagcttccagctcttcggctttgacttcatggtcgatgaggagctgaaggtgtggctcattgaggtcaacggtgcccctgcatgtgctcagaagctctatgcagaactgtgccaaggcatcgtggacatagccatttccagtgtcttcccacccccagatgtggagcaacctcagacccagccagctgccttcatcaagctgtgacagagggcactccctgctgccttggaaaaagcacggggtcctgc

SEQ ID NO: 118 - protein, 377 aa, Homo sapiens
MYTFVVRDENSSVYAEVSRLLLATGHWKRLRRDNPRFNLMLGERNRLPFGRLGHEPGLVQLVNYYRGADKLCRKASLVKLIKTSPELAESCTWFPESYVIYPTNLKTPVAPAQNGIQPPISNSRTDEREFFLASYNRKKEDGEGNVWIAKSSAGAKGEGILISSEASELLDFIDNQGQVHVIQKYLEHPLLLEPGHRKFDIRSWVLVDHQYNIYLYREGVLRTASEPYHVDNFQDKTCHLTNHCIQKEYSKNYGKYEEGNEMFFKEFNQYLTSALNITLESSILLQIKHIIRNCLLSVEPAISTKHLPYQSFQLFGFDFMVDEELKVWLIEVNGAPACAQKLYAELCQGIVDIAISSVFPPPDVEQPQTQPAAFIKL

SEQ ID NO: 119 - DNA, 4562 bp, Homo sapiens
  CDS (71)..(2464)
agaggagacttgatctctagttcattctggaactccgcctgggattgtgcactgtccagggtcctgaaacatgaaccaaactgccagcgtgtcccatcacatcaagtgtcaaccctcaaaaacaatcaaggaactgggaagtaacagccctccacagagaaactggaagggaattgctattgctctgctggtgattttagttgtatgctcactcatcactatgtcagtcatcctcttaaccccaggtttagatgaactcacaaattcgtcagaaaccagattgtctttggaagacctctttaggaaagactttgtgcttcacgatccagaggctcggtggatcaatggtaaggatgtggtgtataaaagcgagaatggacatgtcattaaactgaatatagaaacaaatgctaccacattattattggaaaacacaacttttgtaaccttcaaagcatcaagacattcagtttcaccagatttaaaatatgtccttctggcatatgatgtcaaacagatttttcattattcgtatactgcttcatatgtgatttacaacatacacactagggaagtttgggagttaaatcctccagaagtagaggactccgtcttgcagtacgcggcctggggtgtccaagggcagcagctgatttatatttttgaaaataatatctactatcaacctgatataaagagcagttcattgcgactgacatcttctggaaaagaagaaataatttttaatgggattgctgactggttatatgaagaggaactcctgcattctcacatcgcccactggtggtcaccagatggagaaagacttgccttcctgatgataaatgactctttggtacccaccatggttatccctcggtttactggagcgttgtatcccaaaggaaagcagtatccgtatcctaaggcaggtcaagtgaacccaacaataaaattatatgttgtaaacctgtatggaccaactcacactttggagctcatgccacctgacagctttaaatcaagagaatactatatcactatggttaaatgggtaagcaataccaagactgtggtaagatggttaaaccgacctcagaacatctccatcctcacagtctgtgagaccactacaggtgcttgtagtaaaaaatatgagatgacatcagatacgtggctctctcagcagaatgaggagcccgtgttttctagagacggcagcaaattctttatgacagtgcctgttaagcaagggggacgtggagaatttcaccacatagctatgttcctcatccagagtaaaagtgagcaaattaccgtgcggcatctgacatcaggaaactgggaagtgataaagatcttggcatacgatgaaactactcaaaaaatttactttctgagcactgaatcttctcccagaggaaggcagctgtacagtgcttctactgaaggattattgaatcgccaatgcatttcatgtaatttcatgaaagaacaatgtacatattttgatgccagttttagtcccatgaatcaacatttcttattattctgtgaaggtccaagggtcccagtggtcagcctacatagtacggacaacccagcaaaatattttatattggaaagcaattctatgctgaaggaagctatcctgaagaagaagataggaaagccagaaattaaaatccttcatattgacgactatgaacttcctttacagttgtcccttcccaaagattttatggaccgaaaccagtatgctcttctgttaataatggatgaagaaccaggaggccagctggttacagataagttccatattgactgggattccgtactcattgacatggataatgtcattgtagcaagatttgatggcagaggaagtggattccagggtctgaaaattttgcaggagattcatcgaagattaggttcagtagaagtaaaggaccaaataacagctgtgaaatttttgctgaaactgccttacattgactccaaaagattaagcatttttggaaagggttatggtggctatattgcatcaatgatcttaaaatcagatgaaaagctttttaaatgtggatccgtggttgcacctatcacagacttgaaattgtatgcctcagctttctctgaaagataccttgggatgccatctaaggaagaaagcacttaccaggcagccagtgtgctacataatgttcatggcttgaaagaagaaaatatattaataattcatggaactgctgacacaaaagttcatttccaacactcagcagaattaatcaagcacctaataaaagctggagtgaattatactatgcaggtctacccagatgaaggtcataacgtatctgagaagagcaagtatcatctctacagcacaatcctcaaattcttcagtgattgtttgaaggaagaaatatctgtgctaccacaggaaccagaagaagatgaataatggaccgtatttatacagaactgaagggaatattgaggctcaatgaaacctgacaaagagactgtaatattgtagttgctccagaatgtcaagggcagcttacggagatgtcactggagcagcacgctcagagacagtgaactagcatttgaatacacaagtccaagtctactgtgttgctaggggtgcagaacccgtttctttgtatgagagaggtcaaagggttggtttcctgggagaaattagttttgcattaaagtaggagtagtgcatgttttcttctgttatccccctgtttgttctgtaactagttgctctcattttaatttcactggccaccatcatctttgcatataatgcacaatctatcatctgtcctacagtccctgatctttcatggctgagctgcaatctaacactttactgtacctttataataagtgcaattctttcattgtctattattgtgcttaagaaaatattcagttaataaaaaacagagtattttatgtaatttctgtttttaaaaagacattattaaatgggtcaaaggacatatagaaatgtggatttcagcaccttccaaagttcagccagttatcagtagatacaatatctttaaatgaacacacgagtgtatgtctcacaatatatatacacaagtgtgcatatacagttaatgaaactatctttaaatgttattcatgctataaagagtaaacgtttgatgaattagaagagatgctcttttccaagctataatggatgctttgtttaatgagccaaatatgatgaaacattttttccaattcaaattctagctattgctttcctataaatgtttgggttgtgtttggtattgtttttagtggttaatagttttccagttgcatttaattttttgaatatgataccttgtcacatgtaaattagatacttaaatattaaattatagtttctgataaagaaattttgttaacaatgcaatgccactgagtgctattttgctcttttggtggagaaggcttttttcaaaactcttggtccttttacttctttctctcagtgcagaatcaattctcattttcatcgtaaaagcaaatagctggattatttcatttgccagtttctatttagtattccatgcctgcccaattcatctgttactgtttaatttcaattcttctggtgagaattagaaatgaaatattttttattcattggccaaaaagttcacagacagcagtgtttgctatttactttgaattgaaggcacaaaatgcatcaattcctgtgctgtgttgacttgcagtagtaagtaactgagagcataaaataaacctgactgtatgaagtcaatttaagtgatgagaacatttaactttggtgactaaagtcagaatatcttctcacttcacttaagggatcttccagaagatatctaaaagtctgtaataagcttagaagttcagataaatctaggcaggatactgcatttttgtggttttaaaaaagtccttaggacagactgaattatcataacttatggcatcaggaggaaactttaaaatatcaaggaatcactcagtcaccctcctgttttgttgaaggatcaaccccaaattctgggtatttgagtacatgtgaatcatggatttggtattcaactttttccctggatgctttggaatcgtgtcttccatgctccattgggttcaatttaaaataggagaggctttctcttctgaaagatccattttaggtctttttcaagaatagtgaacacattttttaacaaaataagttgtaattttaaaaggaaagttttgcctattttattaagatggaaatttctttttaggctaatttgaaatccaactgaagctttttaaccaatattttaaatttgaaccactagagttttttatgatgcaaatgattatgttgtctgaaaggtgtggttttattgaatgtctatttgagtatcatttaaaaagtatttgccttttactgtcatcatttctcttgttttattattattatcaatgtttatctatttttcaattaatttaatacagtttctaatgtgaaagac

SEQ ID NO: 120 - protein, 798 aa, Homo sapiens
MNQTASVSHHIKCQPSKTIKELGSNSPPQRNWKGIAIALLVILVVCSLITMSVILLTPGLDELTNSSETRLSLEDLFRKDFVLHDPEARWINGKDVVYKSENGHVIKLNIETNATTLLLENTTFVTFKASRHSVSPDLKYVLLAYDVKQIFHYSYTASYVIYNIHTREVWELNPPEVEDSVLQYAAWGVQGQQLIYIFENNIYYQPDIKSSSLRLTSSGKEEIIFNGIADWLYEEELLHSHIAHWWSPDGERLAFLMINDSLVPTMVIPRFTGALYPKGKQYPYPKAGQVNPTIKLYVVNLYGPTHTLELMPPDSFKSREYYITMVKWVSNTKTVVRWLNRPQNISILTVCETTTGACSKKYEMTSDTWLSQQNEEPVFSRDGSKFFMTVPVKQGGRGEFHHIAMFLIQSKSEQITVRHLTSGNWEVIKILAYDETTQKIYFLSTESSPRGRQLYSASTEGLLNRQCISCNFMKEQCTYFDASFSPMNQHFLLFCEGPRVPVVSLHSTDNPAKYFILESNSMLKEAILKKKIGKPEIKILHIDDYELPLQLSLPKDFMDRNQYALLLIMDEEPGGQLVTDKFHIDWDSVLIDMDNVIVARFDGRGSGFQGLKILQEIHRRLGSVEVKDQITAVKFLLKLPYIDSKRLSIFGKGYGGYIASMILKSDEKLFKCGSVVAPITDLKLYASAFSERYLGMPSKEESTYQAASVLHNVHGLKEENILIIHGTADTKVHFQHSAELIKHLIKAGVNYTMQVYPDEGHNVSEKSKYHLYSTILKFFSDCLKEEISVLPQEPEEDE

SEQ ID NO: 121 - DNA, 2057 bp, Homo sapiens
  CDS (19)..(2046)
attatattccaaatcagcatgggcattaaccatgacaatgaccacccatcgtgtgctgatggtcttcatatcatgtctggtgaatggattaaaggacagaatcttggtgacgtttcatggtctcgatgtagcaaggaagatttggaaagatttctcaggtcaaaggccagtaactgcttgctacaaacaaatccgcagagtgtcaattctgtgatggttccctccaagctgccagggatgacatacactgctgatgaacaatgccagatcctttttgggccattggcttctttttgtcaggagatgcagcatgttatttgcacaggattatggtgcaaggtagaaggtgagaaagaatgcagaaccaagctagacccaccaatggatggaactgactgtgaccttggtaagattctgaagcaagggattgtaatggtcccagaaaacaatacagaatatgtgagaatccaccttgtcctgcaggtttgcctggattcagagactggcaatgtcaggcttatagtgttagaacttcctccccaaagcatatacttcagtggcaagctgtcctggatgaagttgactcttaaatacattaaggtggctgcccacccccatggttcttggaacactcgtgtgccctgcttggttgctgtgttgttaacacctacccggctttcctactacatctctgaaaaaccatgtgccttgttttgctctcctgttggaaaagaacagcctattcttctatcagaaaaagtgatggatggaacttcttgtggctatcagggattagatatctgtgcaaatggcaggtgccagaaagttggctgtgatggtttattagggtctcttgcaagagaagatcattgtggtgtatgcaatggcaatggaaaatcatgcaagatcattaaaggggattttaatcacaccagaggagcaggttatgtagaagtgctggtgatacctgctggagcaagaagaatcaaagttgtggaggaaaagccggcacatagctatttagctctccgagatgctggcaaacagtctattaatagtgactggaagattgaacactctggagccttcaatttggctggaactaccgttcattatgtaagacgaggcctctgggagaagatctctgccaaaggtcctactacagcacctttacatcttctggtgctcctgtttcaggatcagaattatggtcttcactatgaatacactatcccatcagaccctcttccagaaaaccagagctctaaagcacctgagcccctcttcatgtggacacacacaagctgggaagattgcgatgccacttgtggaggaggagaaaggaagacaacagtgtcctgcacaaaaatcatgagcaaaaatatcagcattgtggacaatgagaaatgcaaatacttaaccaagccagagccacagattcgaaagtgcaatgagcaaccatgtcaaacaagggaatatctaataagtcgtgtgagtgctacaagccaggcaatagagagcaaagaaaaggccagtccccattggttgaatggagaagcccttctaggaggaatgggcgtggggctggctgtcaaggatccaggcacaggattctacaaatatcatgaggtgaaaatagaaagtgtttggtggatgatgacagaatggaccccttgttcacgaacttgtggaaaaggaatgcagagcagacaagtggcctgtacccaacaactgagcaatggaacactgattagagcccgagagagggactgcattgggcccaagcccgcctctgcccagcgctgtgagggccaggactgcatgaccgtgtgggaggcgggagtgtggtctgagtgttcagtcaagtgtggcaaaggcatacgtcatcggaccgttagatgtaccaacccaagaaagaagtgtgtcctctctaccagacccagggaggctgaagactgtgaggattattcaaaatgctatgtgtggcgaatgggtgactggtctaaggtgagaaccattctgtatattctcagtaataggtttcaataatgtcagca

SEQ ID NO: 122 - protein, 676 aa, Homo sapiens
MGINHDNDHPSCADGLHIMSGEWIKGQNLGDVSWSRCSKEDLERFLRSKASNCLLQTNPQSVNSVMVPSKLPGMTYTADEQCQILFGPLASFCQEMQHVICTGLWCKVEGEKECRTKLDPPMDGTDCDLGKILKQGIVMVPENNTEYVRIHLVLQVCLDSETGNVRLIVLELPPQSIYFSGKLSWMKLTLKYIKVAAHPHGSWNTRVPCLVAVLLTPTRLSYYISEKPCALFCSPVGKEQPILLSEKVMDGTSCGYQGLDICANGRCQKVGCDGLLGSLAREDHCGVCNGNGKSCKIIKGDFNHTRGAGYVEVLVIPAGARRIKVVEEKPAHSYLALRDAGKQSINSDWKIEHSGAFNLAGTTVHYVRRGLWEKISAKGPTTAPLHLLVLLFQDQNYGLHYEYTIPSDPLPENQSSKAPEPLFMWTHTSWEDCDATCGGGERKTTVSCTKIMSKNISIVDNEKCKYLTKPEPQIRKCNEQPCQTREYLISRVSATSQAIESKEKASPHWLNGEALLGGMGVGLAVKDPGTGFYKYHEVKIESVWWMMTEWTPCSRTCGKGMQSRQVACTQQLSNGTLIRARERDCIGPKPASAQRCEGQDCMTVWEAGVWSECSVKCGKGIRHRTVRCTNPRKKCVLSTRPREAEDCEDYSKCYVWRMGDWSKVRTILYILSNRFQ

SEQ ID NO: 123 - DNA, 3977 bp, Homo sapiens
  CDS (16)..(3813)
gggaagaaccgcgagatgcgcctgactcacatctgctgctgctgcctcctttaccagctggggttcctgtcgaatgggatcgtttcagagctgcagttcgcccccgaccgcgaggagtgggaagtcgtgtttcctgcgctctggcgccgggagccggtggacccggctggcggcagcgggggcagcgcggacccgggctgggtgcgcggcgttgggggcggcggaagcgcccgggcgcaggctgccggcagctcacgcgaggtgcgctctgtggctccggtgcctttggaggagcccgtggagggccgatcagagtcccggctccggcccccgccgccgtcggagggtgaggaggacgaggagctcgagtcgcaggagctgccgcggggatccagcggggctgccgccttgtccccgggcgccccggcctcgtggcagccgccgcctcccccgcagccgcccccgtccccgcccccggcccagcatgccgagccggatggcgacgaagtgttgctgcggatcccggccttctctcgggacctgtacctgctgctccggagagacggccgcttcctggcgccgcgcttcgcagtggaacagcggccaaatcccggccccggccccacgggggcagcatccgccccgcaacctcccgcgccaccagacgcaggctgcttctacaccggagctgtgctgcggcaccctggctcgctggcttctttcagcacctgtggaggtggcctgatgggatttatacagctcaatgaggacttcatatttattgagccactcaatgatacaatggccataacaggtcacccacaccgtgtatataggcagaaaaggtccatggaggaaaaggtcacagagaagtcagctcttcacagtcattactgtggtatcatttcagataaaggaagacctaggtctagaaaaatagcagaaagtggaagagggaaacgatattcatacaaattacctcaagaatacaacatagagactgtagtggttgcagacccagcaatggtttcctatcatggagcagatgcagccaggagattcattctaaccatcttaaatatggtatttaaccttttccaacacaagagtctgggtgtgcaggtcaatcttcgtgtgataaagcttattctgctccatgaaactccaccagaactatatattgggcatcatggagaaaaaatgctagagagtttttgtaagtggcaacatgaagaatttggcaaaaagaatgatatacatttagagatgtcaacaaactggggggaagacatgacttcagtggatgcagctatacttataacaaggaaagatttctgtgtgcacaaagatgaaccatgtgatactgttggtatagcttacttgagtggaatgtgtagtgaaaagagaaaatgtattattgctgaagacaatggcttgaatcttgcttttacaattgctcatgaaatgggtcacaacatgggcattaaccatgacaatgaccacccatcgtgtgctgatggtcttcatatcatgtctggtgaatggattaaaggacagaatcttggtgacgtttcatggtctcgatgtagcaaggaagatttggaaagatttctcaggtcaaaggccagtaactgcttgctacaaacaaatccgcagagtgtcaattctgtgatggttccctccaagctgccagggatgacatacactgctgatgaacaatgccagatcctttttgggccattggcttctttttgtcaggagatgcagcatgttatttgcacaggattatggtgcaaggtagaaggtgagaaagaatgcagaaccaagctagacccaccaatggatggaactgactgtgaccttggtaagtggtgtaaggctggagaatgtaccagcaggacctcagcacctgaacatctggccggagagtggagcctgtggagtccttgtagccgaacctgcagtgctgggatcagcagtcgagagcgcaaatgtcctgggctagattctgaagcaagggattgtaatggtcccagaaaacaatacagaatatgtgagaatccaccttgtcctgcaggtttgcctggattcagagactggcaatgtcaggcttatagtgttagaacttcctccccaaagcatatacttcagtggcaagctgtcctggatgaagaaaaaccatgtgccttgttttgctctcctgttggaaaagaacagcctattcttctatcagaaaaagtgatggatggaacttcttgtggctatcagggattagatatctgtgcaaatggcaggtgccagaaagttggctgtgatggtttattagggtctcttgcaagagaagatcattgtggtgtatgcaatggcaatggaaaatcatgcaagatcattaaaggggattttaatcacaccagaggagcaggttatgtagaagtgctggtgatacctgctggagcaagaagaatcaaagttgtggaggaaaagccggcacatagctatttagctctccgagatgctggcaaacagtctattaatagtgactggaagattgaacactctggagccttcaatttggctggaactaccgttcattatgtaagacgaggcctctgggagaagatctctgccaaaggtcctactacagcacctttacatcttctggtgctcctgtttcaggatcagaattatggtcttcactatgaatacactatcccatcagaccctcttccagaaaaccagagctctaaagcacctgagcccctcttcatgtggacacacacaagctgggaagattgcgatgccacttgtggaggaggagaaaggaagacaacagtgtcctgcacaaaaatcatgagcaaaaatatcagcattgtggacaatgagaaatgcaaatacttaaccaagccagagccacagattcgaaagtgcaatgagcaaccatgtcaaacaagggaatatctaataagtcgtgtgagtgctacaagccaggcaatagagagcaaagaaaaggccagtccccattggttgaatggagaagcccttctaggaggaatgggcgtggggctggctgtcaaggatccaggcacaggattctacaaatatcatgaggtgaaaatagaaagtgtttggtggatgatgacagaatggaccccttgttcacgaacttgtggaaaaggaatgcagagcagacaagtggcctgtacccaacaactgagcaatggaacactgattagagcccgagagagggactgcattgggcccaagcccgcctctgcccagcgctgtgagggccaggactgcatgaccgtgtgggaggcgggagtgtggtctgagtgttcagtcaagtgtggcaaaggcatacgtcatcggaccgttagatgtaccaacccaagaaagaagtgtgtcctctctaccagacccagggaggctgaagactgtgaggattattcaaaatgctatgtgtggcgaatgggtgactggtctaagtgctcaattacctgtggcaaaggaatgcagtcccgtgtaatccaatgcatgcataagatcacaggaagacatggaaatgaatgtttttcctcagaaaaacctgcagcatacaggccatgccatcttcaaccctgcaatgagaaaattaatgtaaataccataacatcacccagactggctgctctgactttcaagtgcctgggagatcagtggccagtgtactgccgagtgatacgtgaaaagaacctatgtcaggacatgcggtggtatcagcgctgctgtgaaacatgcagggacttctatgcccaaaagctgcagcagaagagttgacctctagcaggctggctggatcacagctcttggcaattacattatttataaacacacacactagcatgtttttcagaccaaatattatcagattacatataatttaatcaaattaatttatttttttgcctgccaaacatccaatgtggtgcttgttttgg

SEQ ID NO: 124 - protein, 1266 aa, Homo sapiens
MRLTHICCCCLLYQLGFLSNGIVSELQFAPDREEWEVVFPALWRREPVDPAGGSGGSADPGWVRGVGGGGSARAQAAGSSREVRSVAPVPLEEPVEGRSESRLRPPPPSEGEEDEELESQELPRGSSGAAALSPGAPASWQPPPPPQPPPSPPPAQHAEPDGDEVLLRIPAFSRDLYLLLRRDGRFLAPRFAVEQRPNPGPGPTGAASAPQPPAPPDAGCFYTGAVLRHPGSLASFSTCGGGLMGFIQLNEDFIFIEPLNDTMAITGHPHRVYRQKRSMEEKVTEKSALHSHYCGIISDKGRPRSRKIAESGRGKRYSYKLPQEYNIETVVVADPAMVSYHGADAARRFILTILNMVFNLFQHKSLGVQVNLRVIKLILLHETPPELYIGHHGEKMLESFCKWQHEEFGKKNDIHLEMSTNWGEDMTSVDAAILITRKDFCVHKDEPCDTVGIAYLSGMCSEKRKCIIAEDNGLNLAFTIAHEMGHNMGINHDNDHPSCADGLHIMSGEWIKGQNLGDVSWSRCSKEDLERFLRSKASNCLLQTNPQSVNSVMVPSKLPGMTYTADEQCQILFGPLASFCQEMQHVICTGLWCKVEGEKECRTKLDPPMDGTDCDLGKWCKAGECTSRTSAPEHLAGEWSLWSPCSRTCSAGISSRERKCPGLDSEARDCNGPRKQYRICENPPCPAGLPGFRDWQCQAYSVRTSSPKHILQWQAVLDEEKPCALFCSPVGKEQPILLSEKVMDGTSCGYQGLDICANGRCQKVGCDGLLGSLAREDHCGVCNGNGKSCKIIKGDFNHTRGAGYVEVLVIPAGARRIKVVEEKPAHSYLALRDAGKQSINSDWKIEHSGAFNLAGTTVHYVRRGLWEKISAKGPTTAPLHLLVLLFQDQNYGLHYEYTIPSDPLPENQSSKAPEPLFMWTHTSWEDCDATCGGGERKTTVSCTKIMSKNISIVDNEKCKYLTKPEPQIRKCNEQPCQTREYLISRVSATSQAIESKEKASPHWLNGEALLGGMGVGLAVKDPGTGFYKYHEVKIESVWWMMTEWTPCSRTCGKGMQSRQVACTQQLSNGTLIRARERDCIGPKPASAQRCEGQDCMTVWEAGVWSECSVKCGKGIRHRTVRCTNPRKKCVLSTRPREAEDCEDYSKCYVWRMGDWSKCSITCGKGMQSRVIQCMHKITGRHGNECFSSEKPAAYRPCHLQPCNEKINVNTITSPRLAALTFKCLGDQWPVYCRVIREKNLCQDMRWYQRCCETCRDFYAQKLQQKS

SEQ ID NO: 125 - DNA, 735 bp, Homo sapiens
  CDS (10)..(717)
agtggcaagatggcgtccctggatcgggtgaaggtactggtgttgggagactcaggtgttgggaaatcttcgttagtccatctcctatgccaaaatcaagtgctgggaaatccatcatggactgtgggctgctcagtggatgtcagagttcatgattacaaagaaggaaccccagaagagaagacctactacatagaattatgggatgttggaggctctgtgggcagtgccagcagcgtgaaaagcacaagagcagtattctacaactccgtaaatggtattattttcgtacacgacttaacaaataagaagtcctcccaaaacttgcgtcgttggtcattggaagctctcaacagggatttggtgccaactggagtcttggtgacaaatggggattatgatcaagaacagtttgctgataaccaaataccactgttggtaatagggactaaactggaccagattcatgaaacaaagcgccatgaagttttaactaggactgctttcctggctgaggatttcaatccagaagaaattaatttggactgcacaaatccacggtacttagctgcaggttcttccaatgctgtcaagctcagtaggttttttgataaggtcatagagaagagatactttttaagagaaggtaatcagattccaggctttcctgatcggaaaagatttggggcaggaacattaaagagccttcattatgactgaattacactcatcctt

SEQ ID NO: 126 - protein, 236 aa, Homo sapiens
MASLDRVKVLVLGDSGVGKSSLVHLLCQNQVLGNPSWTVGCSVDVRVHDYKEGTPEEKTYYIELWDVGGSVGSASSVKSTRAVFYNSVNGIIFVHDLTNKKSSQNLRRWSLEALNRDLVPTGVLVTNGDYDQEQFADNQIPLLVIGTKLDQIHETKRHEVLTRTAFLAEDFNPEEINLDCTNPRYLAAGSSNAVKLSRFFDKVIEKRYFLREGNQIPGFPDRKRFGAGTLKSLHYD

SEQ ID NO: 127 - DNA, 739 bp, Homo sapiens
  CDS (10)..(717)
agtggcaagatcgcgtccctggatcgggtgaaggtactggtgttgggagactcaggtgttgggaaatcttcgttagtccatctcctatgccaaaatcaagtgctgggaaatccatcatggactgtgggctgctcagtggatgtcagagttcatgattacaaagaaggaaccccagaagagaagacctactacatagaattatgggatgttggaggctctgtgggcagtgccagcagcgtgaaaagcacaagagcagtattctacaactccgtaaatggtattattttcgtacacgacttaacaaataagaagtcctcccaaaacttgcgtcgttggtcattggaagctctcaacagggatttggtgccaactggagtcttggtgacaaatggggattatgatcaagaacagtttgctgataaccaaataccactgttggtaatagggactaaactggaccagattcatgaaacaaagcgccatgaagttttaactaggactgctttcctggctgaggatttcaatccagaagaaattaatttggactgcacaaatccacggtacttagctgcaggttcctccaatgctgtcaagctcagtaggttttttgataaggtcatagagaagagatactttttaagagaaggtaatcagattccaggctttcctgatcggaaaagatttggggcaggaacattaaagagccttcattatgactgaattacactcatcctaaggg

SEQ ID NO: 128 - protein, 236 aa, Homo sapiens
IASLDRVKVLVLGDSGVGKSSLVHLLCQNQVLGNPSWTVGCSVDVRVHDYKEGTPEEKTYYIELWDVGGSVGSASSVKSTRAVFYNSVNGIIFVHDLTNKKSSQNLRRWSLEALNRDLVPTGVLVTNGDYDQEQFADNQIPLLVIGTKLDQIHETKRHEVLTRTAFLAEDFNPEEINLDCTNPRYLAAGSSNAVKLSRFFDKVIEKRYFLREGNQIPGFPDRKRFGAGTLKSLHYD

SEQ ID NO: 129 - DNA, 3717 bp, Homo sapiens
  CDS (66)..(3353)
ggagccctccagagcgcttctcggctgcctagcgagcgccgccgctgccgccccgccgggggaggatggagcaggggccggggccgaggaggaggaggaggaggaggaggaggcggcggcggcggtgggccccggggcagctgggctgcgacgcgccgctgccctactggacggccgtgttcgagtacgaggcggcgggcgaggacgagctgaccctgcggctgggcgacgtggtggaggtgctgtccaaggactcgcaggtgtccggcgacgagggctggtggaccgggcagctgaaccagcgggtgggcatcttccccagcaactacgtgaccccgcgcagcgccttctccagccgctgccagcccggcggcgaggaccccagttgctacccgcccattcagttgttagaaattgattttgcggagctcaccttggaagagattattggcatcgggggctttgggaaggtctatcgtgctttctggataggggatgaggttgctgtgaaagcagctcgccacgaccctgatgaggacatcagccagaccatagagaatgttcgccaagaggccaagctcttcgccatgctgaagcaccccaacatcattgccctaagaggggtatgtctgaaggagcccaacctctgcttggtcatggagtttgctcgtggaggacctttgaatagagtgttatctgggaaaaggattcccccagacatcctggtgaattgggctgtgcagattgccagagggatgaactacttacatgatgaggcaattgttcccatcatccaccgcgaccttaagtccagcaacatattgatcctccagaaggtggagaatggagacctgagcaacaagattctgaagatcactgattttggcctggctcgggaatggcaccgaaccaccaagatgagtgcggcagggacgtatgcttggatggcacccgaagtcatccgggcctccatgttttccaaaggcagtgatgtgtggagctatggggtgctactttgggagttgctgactggtgaggtgccctttcgaggcattgatggcttagcagtcgcttatggagtggccatgaacaaactcgcccttcctattccttctacgtgcccagaaccttttgccaaactcatggaagactgctggaatcctgatccccactcacgaccatctttcacgaatatcctggaccagctaaccaccatagaggagtctggtttctttgaaatgcccaaggactccttccactgcctgcaggacaactggaaacacgagattcaggagatgtttgaccaactcagggccaaagaaaaggaacttcgcacctgggaggaggagctgacgcgggctgcactgcagcagaagaaccaggaggaactgctgcggcgtcgggagcaggagctggccgagcgggagattgacatcctggaacgggagctcaacatcatcatccaccagctgtgccaggagaagccccgggtgaagaaacgcaagggcaagttcaggaagagccggctgaagctcaaggatggcaaccgcatcagcctcccttctgatttccagcacaagttcacggtgcaggcctcccctaccatggataaaaggaagagtcttatcaacagccgctccagtcctcctgcaagccccaccatcattcctcgccttcgagccatccagttgacaccaggtgaaagcagcaaaacctggggcaggagctcagtcgtcccaaaggaggaaggggaggaggaggagaagagggccccaaagaagaagggacggacgtgggggccagggacgcttggtcagaaagagcttgcctcgggagatgaaggatcccctcagagacgtgagaaagctaatggtttaagtaccccatcagaatctccacatttccacttgggcctcaagtccctggtagatggatataagcagtggtcgtccagtgcccccaacctggtgaagggcccaaggagtagcccggccctgccagggttcaccagccttatggagatggccttgctggcagccagttgggtggtgcccatcgacattgaagaggatgaggacagtgaaggcccagggagtggagagagtcgcctacagcattcacccagccagtcctacctctgtatcccattccctcgtggagaggatggcgatggcccctccagtgatggaatccatgaggagcccaccccagtcaactcggccacgagtacccctcagctgacgccaaccaacagcctcaagcggggcggtgcccaccaccgccgctgcgaggtggctctgctcggctgtggggctgttctggcagccacaggcctagggtttgacttgctggaagctggcaagtgccagctgcttcccctggaggagcctgagccaccagcccgggaggagaagaaaagacgggagggtctttttcagaggtccagccgtcctcgtcggagcaccagccccccatcccgaaagcttttcaagaaggaggagcccatgctgttgctaggagacccctctgcctccctgacgctgctctccctctcctccatctccgagtgcaactccacacgctccctgctgcgctccgacagcgatgaaattgtcgtgtatgagatgccagtcagcccagtcgaggcccctcccctgagtccatgtacccacaaccccctggtcaatgtccgagtagagcgcttcaaacgagatcctaaccaatctctgactcccacccatgtcaccctcaccaccccctcgcagcccagcagtcaccggcggactccttctgatggggcccttaagccagagactctcctagccagcaggagcccctccagcaatgggttgagccccagtcctggagcaggaatgttgaaaacccccagtcccagccgagacccaggtgaattcccccgtctccctgaccccaatgtggtcttccccccaaccccaaggcgctggaacactcagcaggactctaccttggagagacccaagactctggagtttctgcctcggccgcgtccttctgccaaccggcaacggctggacccttggtggtttgtgtcccccagccatgcccgcagcacctccccagccaacagctccagcacagagacgcccagcaacctggactcctgctttgctagcagtagcagcactgtagaggagcggcctggacttccagccctgctcccgttccaggcagggccgctgcccccgactgagcggacgctcctggacctggatgcagaggggcagagtcaggacagcaccgtgccgctgtgcagagcggaactgaacacacacaggcctgccccttatgagatccagcaggagttctggtcttagcacgaaaaggattggggcgggcaagggggacagccagcggagatgaggggagctggcgggcacagccctttctcagggttggaccccctgagatccagccctacttcttgcactgataatgcactttgaagatggaagggatggaaacagggccacttcagagggtctcctgccctgcagggcctttctacccgtgtccactggaggggctgtggccatcagctctggctgtgtaggggaggaaggggtgcatgcatgtcccccaccctccacagtcttccttgcctttagagtgaccctgcagagtcactcagccaaatctgtctgctgctccctctcctcagccagttgggtgtgcgca

SEQ ID NO: 130 - protein, 1096 aa, Homo sapiens
MEQGPGPRRRRRRRRRRRRRWAPGQLGCDAPLPYWTAVFEYEAAGEDELTLRLGDVVEVLSKDSQVSGDEGWWTGQLNQRVGIFPSNYVTPRSAFSSRCQPGGEDPSCYPPIQLLEIDFAELTLEEIIGIGGFGKVYRAFWIGDEVAVKAARHDPDEDISQTIENVRQEAKLFAMLKHPNIIALRGVCLKEPNLCLVMEFARGGPLNRVLSGKRIPPDILVNWAVQIARGMNYLHDEAIVPIIHRDLKSSNILILQKVENGDLSNKILKITDFGLAREWHRTTKMSAAGTYAWMAPEVIRASMFSKGSDVWSYGVLLWELLTGEVPFRGIDGLAVAYGVAMNKLALPIPSTCPEPFAKLMEDCWNPDPHSRPSFTNILDQLTTIEESGFFEMPKDSFHCLQDNWKHEIQEMFDQLRAKEKELRTWEEELTRAALQQKNQEELLRRREQELAEREIDILERELNIIIHQLCQEKPRVKKRKGKFRKSRLKLKDGNRISLPSDFQHKFTVQASPTMDKRKSLINSRSSPPASPTIIPRLRAIQLTPGESSKTWGRSSVVPKEEGEEEEKRAPKKKGRTWGPGTLGQKELASGDEGSPQRREKANGLSTPSESPHFHLGLKSLVDGYKQWSSSAPNLVKGPRSSPALPGFTSLMEMALLAASWVVPIDIEEDEDSEGPGSGESRLQHSPSQSYLCIPFPRGEDGDGPSSDGIHEEPTPVNSATSTPQLTPTNSLKRGGAHHRRCEVALLGCGAVLAATGLGFDLLEAGKCQLLPLEEPEPPAREEKKRREGLFQRSSRPRRSTSPPSRKLFKKEEPMLLLGDPSASLTLLSLSSISECNSTRSLLRSDSDEIVVYEMPVSPVEAPPLSPCTHNPLVNVRVERFKRDPNQSLTPTHVTLTTPSQPSSHRRTPSDGALKPETLLASRSPSSNGLSPSPGAGMLKTPSPSRDPGEFPRLPDPNVVFPPTPRRWNTQQDSTLERPKTLEFLPRPRPSANRQRLDPWWFVSPSHARSTSPANSSSTETPSNLDSCFASSSSTVEERPGLPALLPFQAGPLPPTERTLLDLDAEGQSQDSTVPLCRAELNTHRPAPYEIQQEFWS

SEQ ID NO: 131 - DNA, 4803 bp, Homo sapiens
  CDS (165)..(4496)
agaaggaagtggcctggtggatacacacctgttctctgcaggctctttccttgtcatgtttctcccctggggtttgcagcctggcttttcatttttagtatccttctgaaagaagagagaaaaattttcagcaaagaaggcaagtaaaagatgaaaattaaattatgagaattaaaaagacaacattgagcagagacatgaaaaaggaagggaggaaaaggtggaaaagaaaagaagacaagaagcgagtagtggtctctaacttgctctttgaaggatggtctcacaaagagaaccccaacagacatcatcgtgggaatcaaatcaagaccagcaagtacaccgtgttgtccttcgtccccaaaaacatttttgagcagctacaccggttggccaatctctattttgtgggcattgcggttctgaattttatccctgtggtcaatgctttccagcctgaggtgagcatgataccaatctgtgttatcctggcagtcactgccatcaaggacgcttgggaagacctccggaggtacaaatcggataaagtcatcaataaccgagagtgcctcatctacagcagaaaagagcagacctatgtgcagaagtgctggaaggatgtgcgcgtgggagacttcatccaaatgaaatgcaatgagattgtcccagcagacatactcctccttttttcctctgaccccaatgggatatgccatctggaaactgccagcttggatggagagacaaacctcaagcaaagacgtgtcgtgaagggcttctcacagcaggaggtacagttcgaaccagagcttttccacaataccatcgtgtgtgagaaacccaacaaccacctcaacaaatttaagggttatatggagcatcctgaccagaccaggactggctttggctgtgagagtcttctgcttcgaggctgcaccatcagaaacaccgagatggctgttggcattgtcatctatgcaggccatgagacgaaagccatgctgaacaacagtggcccccggtacaaacgcagcaagattgagcggcgcatgaatatagacatcttcttctgcattgggatcctcatcctcatgtgccttattggagctgtaggtcacagcatctggaatgggacctttgaagaacaccctcccttcgatgtgccagatgccaatggcagcttccttcccagtgcccttgggggcttctacatgttcctcacaatgatcatcctgctccaggtgctgatccccatctctttgtatgtctccattgagctggtgaagctcgggcaagtgttcttcttgagcaatgaccttgacctgtatgatgaagagaccgatttatccattcaatgtcgagccctcaacatcgcagaggacttgggccagatccagtacatcttctccgataagacggggaccctgacagagaacaagatggtgttccgacgttgcaccatcatgggcagcgagtattctcaccaagaaaatgctaagcgactggagaccccaaaggagctggactcagatggtgaagagtggacccaataccaatgcctgtccttctcggctagatgggcccaggatccagcaactatgagaagccaaaaaggtgctcagcctctgaggaggagccagagtgcccgggtgcccatccagggccactaccggcaaaggtctatggggcaccgtgaaagctcacagcctcctgtggccttcagcagctccatagaaaaagatgtaactccagataaaaacctactgaccaaggttcgagatgctgccctgtggttggagaccttgtcagacagcagacctgccaaggcttccctctccaccacctcctccattgctgatttcttccttgacttaaccatctgcaactctgtcatggtgtccacaaccaccgagcccaggcagagggtcaccatcaaaccctcaagcaaggctctggggacgtccctggagaagattcagcagctcttccagaagttgaagctattgagcctcagccagtcattctcatccactgcaccctctgacacagacctcggggagagcttaggggccaacgtggccaccacagactcggatgagagagatgatgcatctgtgtgcagtggaggtgactccactgatgacggtggctacaggagcagcatgtgggaccagggcgacatcctggagtctgggtcaggcacttccttggaggaggcattggaggccccagccacagacctggccaggcctgagttctgttacgaggctgagagccctgatgaggccgccctggtgcacgctgcccatgcctacagcttcacactagtgtcccggacacctgagcaggtgactgtgcgcctgccccagggcacctgcctcaccttcagcctcctctgcaccctgggctttgactctgtcaggaagagaatgtctgtggttgtgaggcacccactgactggcgagattgttgtctacaccaagggtgctgactcggtcatcatggacctgctggaagacccagcctgcgtacctgacattaatatggaaaagaagctgagaaaaatccgagcccggacccaaaagcatctagacttgtatgcaagagatggcctgcgcacactatgcattgccaagaaggttgtaagcgaagaggacttccggagatgggccagtttccggcgtgaggctgaggcatccctcgacaaccgagatgagcttctcatggaaactgcacagcatctggagaatcaactcaccttacttggagccactgggatcgaagaccggctgcaggaaggagttccagatacgattgccactctgcgggaggctgggatccagctctgggtcctgactggagataagcaggagacagcggtcaacattgcccattcctgcagactgttaaatcagaccgacactgtttataccatcaatacagagaatcaggagacctgtgaatccatcctcaattgtgcattggaagagctaaagcaatttcgtgaactacagaagccagaccgcaagctctttggattccgcttaccttccaagacaccatccatcacctcagaagctgtggttccagaagctggattggtcatcgatgggaagacattgaatgccatcttccagggaaagctagagaagaagtttctggaattgacccagtattgtcggtccgtcctgtgctgccgctccacgccactccagaagagtatgatagtcaagctggtgcgagacaagttgcgcgtcatgaccctttccataggtgatggagcaaatgatgtaagcatgattcaagctgctgatattggaattggaatatctggacaggaaggcatgcaggctgtcatgtccagcgactttgccatcacccgctttaagcatctcaagaagttgctgctcgtgcatggccactggtgttactcgcgcctggccaggatggtggtgtactacctctacaagaacgtgtgctacgtcaacctgctcttctggtatcagttcttctgtggtttctccagctccaccatgattgattactggcagatgatattcttcaatctcttctttacctccttgcctcctcttgtctttggagtccttgacaaagacatctctgcagaaacactcctggcattgcctgagctatacaagagtggccagaactctgagtgctataacctgtcgactttctggatttctatggtggatgcattctaccagagcctcatctgtttctttatcccttacctggcctataagggctctgatatagatgtctttacctttgggacaccaatcaacaccatctccctcaccacaatccttttgcaccaggcaatggaaatgaagacatggaccattttccacggagtcgtgctcctcggcagcttcctgatgtactttctggtatccctcctgtacaatgccacctgcgtcatctgcaacagccccaccaatccctattgggtgatggaaggccagctctcaaaccccactttctacctcgtctgctttctcacaccagttgttgctcttctcccaagatactttttcctgtctctgcaaggaacttgtgggaagtctctaatctcaaaagctcagaaaattgacaaactccccccagacaaaagaaacctggaaatccagagttggagaagcagacagaggcctgcccctgtccccgaagtggctcgaccaactcaccacccagtgtcatctatcacaggacaggacttcagtgccagcaccccaaagagctctaaccctcccaagaggaagcatgtggaagagtcagtactccacgaacagagatgtggcacggagtgcatgagggatgactcatgctcaggggactcctcagctcaactctcatccggggagcacctgctgggacctaacaggataatggcctactcaagaggacagactgatatgtgccggtgctcaaagaggagcagccatcgccgatcccagagttcactgaccatatgaggagctgcagaaatctgtacaaactcaacagaggccacctagtcactggtccacataacccttgaccccttcttcttcatagaggaaacaatgtgccagtcttattcttttcttcaacaaccttgacttccatggaggaagtgctggccccaaggggtctgacacaaagacgggaaacccagtcggcctctagttttctgctgctctcaggcagcacatcttgcaaacagtttggagaaggaggctgtttttgttgaatcgagttctcaaatcggtttagaccaaagccattcttctgaccctc

SEQ ID NO: 132 - protein, 1444 aa, Homo sapiens
MRIKKTTLSRDMKKEGRKRWKRKEDKKRVVVSNLLFEGWSHKENPNRHHRGNQIKTSKYTVLSFVPKNIFEQLHRLANLYFVGIAVLNFIPVVNAFQPEVSMIPICVILAVTAIKDAWEDLRRYKSDKVINNRECLIYSRKEQTYVQKCWKDVRVGDFIQMKCNEIVPADILLLFSSDPNGICHLETASLDGETNLKQRRVVKGFSQQEVQFEPELFHNTIVCEKPNNHLNKFKGYMEHPDQTRTGFGCESLLLRGCTIRNTEMAVGIVIYAGHETKAMLNNSGPRYKRSKIERRMNIDIFFCIGILILMCLIGAVGHSIWNGTFEEHPPFDVPDANGSFLPSALGGFYMFLTMIILLQVLIPISLYVSIELVKLGQVFFLSNDLDLYDEETDLSIQCRALNIAEDLGQIQYIFSDKTGTLTENKMVFRRCTIMGSEYSHQENAKRLETPKELDSDGEEWTQYQCLSFSARWAQDPATMRSQKGAQPLRRSQSARVPIQGHYRQRSMGHRESSQPPVAFSSSIEKDVTPDKNLLTKVRDAALWLETLSDSRPAKASLSTTSSIADFFLDLTICNSVMVSTTTEPRQRVTIKPSSKALGTSLEKIQQLFQKLKLLSLSQSFSSTAPSDTDLGESLGANVATTDSDERDDASVCSGGDSTDDGGYRSSMWDQGDILESGSGTSLEEALEAPATDLARPEFCYEAESPDEAALVHAAHAYSFTLVSRTPEQVTVRLPQGTCLTFSLLCTLGFDSVRKRMSVVVRHPLTGEIVVYTKGADSVIMDLLEDPACVPDINMEKKLRKIRARTQKHLDLYARDGLRTLCIAKKVVSEEDFRRWASFRREAEASLDNRDELLMETAQHLENQLTLLGATGIEDRLQEGVPDTIATLREAGIQLWVLTGDKQETAVNIAHSCRLLNQTDTVYTINTENQETCESILNCALEELKQFRELQKPDRKLFGFRLPSKTPSITSEAVVPEAGLVIDGKTLNAIFQGKLEKKFLELTQYCRSVLCCRSTPLQKSMIVKLVRDKLRVMTLSIGDGANDVSMIQAADIGIGISGQEGMQAVMSSDFAITRFKHLKKLLLVHGHWCYSRLARMVVYYLYKNVCYVNLLFWYQFFCGFSSSTMIDYWQMIFFNLFFTSLPPLVFGVLDKDISAETLLALPELYKSGQNSECYNLSTFWISMVDAFYQSLICFFIPYLAYKGSDIDVFTFGTPINTISLTTILLHQAMEMKTWTIFHGVVLLGSFLMYFLVSLLYNATCVICNSPTNPYWVMEGQLSNPTFYLVCFLTPVVALLPRYFFLSLQGTCGKSLISKAQKIDKLPPDKRNLEIQSWRSRQRPAPVPEVARPTHHPVSSITGQDFSASTPKSSNPPKRKHVEESVLHEQRCGTECMRDDSCSGDSSAQLSSGEHLLGPNRIMAYSRGQTDMCRCSKRSSHRRSQSSLTI

SEQ ID NO: 133 - DNA, 569 bp, Homo sapiens
  CDS (43)..(537)
tgctttgcagatgctgccgtcgggagctctgtattaccagccatggtcaaccccaccgtgttcttccacatctctgtcgacggtgagtccttgggccgcatctcttttgagctgtttgcagacaagtttccaaagacagcagaaaacttttgtgctctgaatactggagagaaaggatttggttacaagggttgctgctttcacagaattattccagggtttatgtgtcatggtggtgacttcacacaccataatggcactggtggcaagtcaatctacggggagaaagttgatgatgacaacttcatcctgaagcatacaggtcctggcatattgtccatggcaaatgctggacccaacacaaatggttcccagtttttcatctgcactgccaagtctgagtggttggatagcaagcatgtggtcattggcaaggtgaaagaaggcatgaatattgtggaggccatggagcactttgggtccaggaatggcaagaccagcaagaaggtcaccattcctgactttggacaactcgaataagtttgacttgtgttttatcttaaccactg

SEQ ID NO: 134 - protein, 165 aa, Homo sapiens [sequence omitted]

SEQ ID NO: 135 - DNA, 568 bp, Homo sapiens
  CDS (57)..(551)
taacccatctccctcactcttcctgggcaccacagacattctcaagtcccccctggatggggggcccgggctgtggcaaagggacacagtgcaagaatatggcgaccaagtacggcttctgccatgtggggctggaccagctactgagacaggaggctcaaaggagcacgcagcggggccggcagatccgtgacatcacgctgcaggggctcctggtgcccgcgggcatcatcccagatatggtcagtgacaacatgttgtcccgcccggagagccggggcttcctcatcgatggctttccccaggaggtgaagcaggccatggagtttgagcgcatcgtgagtggccctgaagtgtgggtgtgggtgggccaggcccccagcgtcgtcatcgtgtttgactgctccatggagacgatgctccgacgagtgctacactggggccaggtggagcaccgggcagacgactcggagctggccatccaccagcgcttggacacgcactataccttgtgtgagccggtcttgacctaccagcgcaataacctgctctgaaacgtaggtgctcc

SEQ ID NO: 136 - protein, 165 aa, Homo sapiens
MGGPGCGKGTQCKNMATKYGFCHVGLDQLLRQEAQRSTQRGRQIRDITLQGLLVPAGIIPDMVSDNMLSRPESRGFLIDGFPQEVKQAMEFERIVSGPEVWVWVGQAPSVVIVFDCSMETMLRRVLHWGQVEHRADDSELAIHQRLDTHYTLCEPVLTYQRNNLL

SEQ ID NO: 137 - DNA, 2876 bp, Homo sapiens
  CDS (23)..(2770)
tttttacctggagttgtatactatgtggaccgttactggaaagaatggttttttcatttatggaatcttagagttggaagggatttcaaggttaaaagttgtgctccttgatattgtaggtgaagaaatggaggctccaggaggtgatatgagtaacccactgtcacaaggccaaacctttgaggaagctgataagaatggtgacggcttgctgaatattgaagagatacatcagctgatgcataaactgaatgttaatctgccccgaagaaaagtcagacaaatgtttcaggaagccgacacagatgagaatcagggaactttgacatttgaagagttctgtgttttttacaaaatgatgtctttgagacgagacctttatttgttacttttgagctacagtgacaagaaagatcacctaactgtggaagaactggctcagtttttgaaggtggagcaaaagatgaataatgtgacaacggactattgtcttgacatcataaagaagtttgaagtttcagaagaaaataaggtgaaaaatgttcttggcatagaaggcttcacgaacttcatgcgtagtcctgcctgtgacatatttaacccattgcaccatgaagtgtaccaagacatggatcagcccctctgcaactactacattgcttcctctcacaatacatacctgactggagaccagctcctttctcagtccaaagtggatatgtatgcacgggtgctgcaagagggctgtcgctgtgtggaagttgactgttgggatggcccagatggagagccagtagtacatcatggttacactctcacttcaaaaattctcttcagagatgttgtggagaccatcaacaagcatgcctttgtgaagaatgagtttcctgttatattgtctatcgagaatcactgcagtatccagcagcaaaggaagattgctcagtacctgaaaggaatattcggagacaaactggacctgtcatctgttgatacaggggagtgcaagcagcttccaagccctcaaagtttgaaaggcaaaattctagtgaagggtaagaagttgccttatcaccttggggatgatgcagaggaaggggaagtttccgatgaggacagtgcagatgaaattgaagacgagtgcaaattcaagctccattatagtaatgggaccactgagcatcaggtggaatctttcataaggaaaaaactggagtcactgttaaaagaatctcaaattcgagataaagaagatcctgatagtttcacagtgcgggcactactgaaggccacgcatgaaggcttaaatgcacacctgaagcagagtccagatgtaaaggaaagtggaaagaaatcacatggacgatccctcatgaccaactttggaaaacataagaaaactacaaaatcacggtctaaatcttacagtactgatgatgaggaagacacacagcagagtactggcaaggagggtggccagctgtacagattgggtcgccgaaggaaaaccatgaagctctgccgagaactctctgatttggttgtgtacacaaactccgtggccgctcaggacattgtggatgacggaaccacaggaaatgtgttatcattcagtgaaacaagagcacatcaggttgttcagcaaaaatcagagcagttcatgatttataatcaaaagcaactcacgaggatttacccctctgcctaccgcattgattccagtaacttcaaccctctcccctactggaacgcaggctgccagctagtggcactgaattatcaatctgaaggacgaatgatgcagttaaaccgagccaaattcaaggcaaatggcaattgtggctatgtcctcaaaccccagcaaatgtgcaaaggtactttcaaccctttctctggtgaccctcttcctgccaaccccaaaaagcagctcatcctgaaagttatcagtggacagcaactccccaaacctccagactccatgtttggagatcgaggcgagatcattgacccttttgttgaagttgaaattattggattgccagtagattgttgtaaagatcaaacccgtgtggtagatgacaatggatttaaccctgtgtgggaagaaacactgacatttacagtacacatgccagaaatagctttggttcggttccttgtgtgggatcacgatcccattggacgagactttgttggacaaagaactgtgaccttcagcagcttagtgcctggctaccggcatgtctatttggaaggactgacagaagcatccatatttgtacacataaccatcaatgaaatctatggaaagaacagacaactccagggtctgaagggactgttcaataagaatcctaggcacagttcttcagaaaacaattcccattatgtacggaagcgatccattggagatagaattctgcgacgcacagctagcgccccagccaaaggcaggaaaaagagcaaaatgggcttccaagaaatggtggagataaaggattctgtgtccgaggccacaagagatcaagatggcgtgctgaggaggaccacacgcagtttgcaagcacgccctgtctctatgcctgttgacagaaaccttctgggagctttgtcgctgcctgtatctgaaacagcaaaagacattgaaggaaaagaaaactctctagactctagcttttgcaggccgactgagcaggctaaagcagaaatgtgcaaagtgcctttccccagacagttagaatgtgtaatgaagatggaaatttccgagacctgaatccccaaacccagactgatctctcttctcttcttgaatataaaagtaagctggcaagatttaaaaaactgaacccaaataaatattcatcatttttttcttc

SEQ ID NO: 138 - protein, 916 aa, Homo sapiens
MWTVTGKNGFFIYGILELEGISRLKVVLLDIVGEEMEAPGGDMSNPLSQGQTFEEADKNGDGLLNIEEIHQLMHKLNVNLPRRKVRQMFQEADTDENQGTLTFEEFCVFYKMMSLRRDLYLLLLSYSDKKDHLTVEELAQFLKVEQKMNNVTTDYCLDIIKKFEVSEENKVKNVLGIEGFTNFMRSPACDIFNPLHHEVYQDMDQPLCNYYIASSHNTYLTGDQLLSQSKVDMYARVLQEGCRCVEVDCWDGPDGEPVVHHGYTLTSKILFRDVVETINKHAFVKNEFPVILSIENHCSIQQQRKIAQYLKGIFGDKLDLSSVDTGECKQLPSPQSLKGKILVKGKKLPYHLGDDAEEGEVSDEDSADEIEDECKFKLHYSNGTTEHQVESFIRKKLESLLKESQIRDKEDPDSFTVRALLKATHEGLNAHLKQSPDVKESGKKSHGRSLMTNFGKHKKTTKSRSKSYSTDDEEDTQQSTGKEGGQLYRLGRRRKTMKLCRELSDLVVYTNSVAAQDIVDDGTTGNVLSFSETRAHQVVQQKSEQFMIYNQKQLTRIYPSAYRIDSSNFNPLPYWNAGCQLVALNYQSEGRMMQLNRAKFKANGNCGYVLKPQQMCKGTFNPFSGDPLPANPKKQLILKVISGQQLPKPPDSMFGDRGEIIDPFVEVEIIGLPVDCCKDQTRVVDDNGFNPVWEETLTFTVHMPEIALVRFLVWDHDPIGRDFVGQRTVTFSSLVPGYRHVYLEGLTEASIFVHITINEIYGKNRQLQGLKGLFNKNPRHSSSENNSHYVRKRSIGDRILRRTASAPAKGRKKSKMGFQEMVEIKDSVSEATRDQDGVLRRTTRSLQARPVSMPVDRNLLGALSLPVSETAKDIEGKENSLDSSFCRPTEQAKAEMCKVPFPRQLECVMKMEISET

SEQ ID NO: 139 - DNA, 1742 bp, Homo sapiens
  CDS (342)..(1667)
taatttaaaccagtgtttgtgcggttctgattcatctgctgtggttcccgaagcttgagatctaaggagtacagggtcttttgtgatgacaatatgactaatagtaaaggaagatctattaccgataaaacaagtggtggtccaagtagtggaggaggttttgtagattggactttacgtttaaacacaattcaatccgacaagtttttaaatttactcttgagtatggttccagtgatttaccagaaaaaccaagaagacaggcacaaaaaagcaaacggcatttggcaagatggatatcaactgcagtacagacttttagtaatagatctgagcaacacatggagtatcacagtttctcagagcagtcttttcatgccaataatgggcacgcatcatcaagctgcagccaaaagtatgatgactatgccaattgtaattactgtgatggaagggagacttcagaaaccactgccatgttacaagatgaagatatatctagtgatggtgatgaagatgctattgtagaagtgaccccaaaattaccaaaggaatccagtggcatcatggcattgcaaatacttgtgccctttttgctagctggttttggaacagtttcagctggcatggtactggatatagtacagcactgggaggtgttcagaaaagttacagaagttttcattttagtccctgcacttcttggtctcaaagggaacttggaaatgacattggcatccagattatccactgcagtaaatattgggaagatggattcacccattgaaaagtggaacctaataattggcaacttggctttaaagcagggaataataatggttggggttatcgttggttcaaagaagactggtataaatcctgataatgttgctacacccattgctgctagttttggcgaccttataactcttgccatattggcttggataagtcagggcttatactcctgtcttgagacctattactacatttctccattagttggtgtatttttcttggctctaacccctatttggattataatagctgccaaacatccagccacaagaacagttctccactcaggctgggagcctgtcataacagctatggttataagtagcattgggggccttattctggacacaactgtatcagacccaaacttggttgggattgttgtttacacgccagttattaatggtattggtggtaatttggtggccattcaggctagcaggatttctacctacctccatttacatagcattccaggagaattgcctgatgaacccaaaggttgttactacccatttagaactttctttggtccaggagtaaataataagtctgctcaagttctactgcttttagtgattcctggacatttaattttcctctacactattcatttgatgaaaagtggtcatacttctttaactataatcttcatagtagtgtatttatttggcgctgtgttacaggtatttaccttgctgtggattgctgactggatggtccatcacttctggaggaaaggaaaggacccggatagtttctccatcccctacctaacagcattgggtgatctgctcgggacagctctgttagccttaagttttcattttctttggcttattggagatcgagatggagatgttggagactaataaattctacaaactgctctcaagttaccaaggaagaaaatacacgacaaccacttatcgctctttttcaaa

SEQ ID NO: 140 - protein, 442 aa, Homo sapiens
MEYHSFSEQSFHANNGHASSSCSQKYDDYANCNYCDGRETSETTAMLQDEDISSDGDEDAIVEVTPKLPKESSGIMALQILVPFLLAGFGTVSAGMVLDIVQHWEVFRKVTEVFILVPALLGLKGNLEMTLASRLSTAVNIGKMDSPIEKWNLIIGNLALKQGIIMVGVIVGSKKTGINPDNVATPIAASFGDLITLAILAWISQGLYSCLETYYYISPLVGVFFLALTPIWIIIAAKHPATRTVLHSGWEPVITAMVISSIGGLILDTTVSDPNLVGIVVYTPVINGIGGNLVAIQASRISTYLHLHSIPGELPDEPKGCYYPFRTFFGPGVNNKSAQVLLLLVIPGHLIFLYTIHLMKSGHTSLTIIFIVVYLFGAVLQVFTLLWIADWMVHHFWRKGKDPDSFSIPYLTALGDLLGTALLALSFHFLWLIGDRDGDVGD

SEQ ID NO: 141 - DNA, 2200 bp, Homo sapiens
  CDS (21)..(2156)
tgcagcctccagccagaaggatggggtggctcccactcctgctgcttctgactcaatgcttaggggtccctgggcagcgctcgccattgaatgacttcgaggtgctccggggcacagagctacagcggctgctacaagcggtggtgcccgggccttggcaggaggatgtggcagatgctgaagagtgtgctggtcgctgtgggcccttaatggactgccgggcgttccactacaatgtgagcagccatggttgccaactgctgccatggactcaacactcaccccacacgaggctgcggcattctgggcgctgtgacctcttccaggagaaagactacatacggacctgcatcatgaacaatggggttgggtaccggggcaccatggccacgaccgtgggtggcctgtcctgccaggcttggagccacaagttcccgaacgatcacaggtacatgcccacgctccggaatggcctggaagagaacttctgccgtaaccctgatggcgaccccggaggtccttggtgccacacaacagaccctgccgtgcgcttccagagctgcggcatcaaatcctgccggtctgccgcgtgtgtctggtgcaatggcgaggaataccgcggcgcggtagaccgcaccgagtcagggcgcgagtgccagcgctgggatcttcagcacccgcaccagcaccccttcgagccgggcaagtaccccgaccaaggtctggacgacaactattgccggaatcctgacggctccgagcggccatggtgctacactacggatccgcagatcgagcgagaattctgtgacctcccccgctgcggttccgaggcacagccccgccaagaggccacaagtgtcagctgcttccgcgggaagggtgagggctaccggggcacagccaataccaccaccgcgggcgtaccttgccagcgttgggacgcgcaaatcccgcatcagcaccgatttacgccagaaaaatacgcgtgcaaggaccttcgggagaacttctgccggaaccccgacggctcagaggcgccctggtgcttcacactgcggcccggcatgcgcgtgggcttttgctaccagatccggcgttgtacagacgacgtgcggccccagggttgctaccacggcgcgggggagcagtaccgcggcacggtcagcaagacccgcaagggtgtccagtgccagcgcgcgtccgctgagacgccgcacaagccgcagtttacctttacctccgaaccgcatgcacaactggaggagaacttctgccgcgacccagatggggatagctatgggccctggtgctacacgatggacccaaggaccccattcgactactgtgccctgcgacgctgcgctgatgaccagccgccatcaatcctggacccccccgaccaggtgcagtttgagaagtgtggcaagagggtggatcggctggatcagcgttgttccaagctgcgcgtggctgggggccatccgggcaactcaccctggacagtcagcttgcggaataggcagggccagcatttctgcggggggtctctagtgaaggagcagtggatactgactgcccggcagtgcttctcctccagccatatgcctctcacgggctatgaggtatggttgggcaccctgttccagaacccacaacatggagagccaggcctacagcgggtcccagtagccaagatgctgtgtgggccctcaggctctcagcttgtcctgctcaagctggagagatctgtgaccctgaaccagcgtgtggccctgatctgcctgccgcctgaatggtatgtggtgcctccagggaccaagtgtgagattgcaggccggggtgagaccaaaggtacgggtaatgacacagtcctaaatgtggccttgctgaatgtcatctccaaccaggagtgtaacatcaagcaccgaggacatgtgcgggagagcgagatgtgcactgagggactgttggcccctgtgggggcctgtgaggggggtgactacgggggcccacttgcctgctttacccacaactgctgggtcctggaaggaattagaatccccaaccgagtatgcgcaaggtcgcgctggccagccgtcttcacacgtgtctctgtgtttgtggactggattcacaaggtcatgagactgggttaggcccagccttgacgccatatgctttggggaggacaaaactt

SEQ ID NO: 142 - protein, 712 aa, Homo sapiens
MGWLPLLLLLTQCLGVPGQRSPLNDFEVLRGTELQRLLQAVVPGPWQEDVADAEECAGRCGPLMDCRAFHYNVSSHGCQLLPWTQHSPHTRLRHSGRCDLFQEKDYIRTCIMNNGVGYRGTMATTVGGLSCQAWSHKFPNDHRYMPTLRNGLEENFCRNPDGDPGGPWCHTTDPAVRFQSCGIKSCRSAACVWCNGEEYRGAVDRTESGRECQRWDLQHPHQHPFEPGKYPDQGLDDNYCRNPDGSERPWCYTTDPQIEREFCDLPRCGSEAQPRQEATSVSCFRGKGEGYRGTANTTTAGVPCQRWDAQIPHQHRFTPEKYACKDLRENFCRNPDGSEAPWCFTLRPGMRVGFCYQIRRCTDDVRPQGCYHGAGEQYRGTVSKTRKGVQCQRASAETPHKPQFTFTSEPHAQLEENFCRDPDGDSYGPWCYTMDPRTPFDYCALRRCADDQPPSILDPPDQVQFEKCGKRVDRLDQRCSKLRVAGGHPGNSPWTVSLRNRQGQHFCGGSLVKEQWILTARQCFSSSHMPLTGYEVWLGTLFQNPQHGEPGLQRVPVAKMLCGPSGSQLVLLKLERSVTLNQRVALICLPPEWYVVPPGTKCEIAGRGETKGTGNDTVLNVALLNVISNQECNIKHRGHVRESEMCTEGLLAPVGACEGGDYGGPLACFTHNCWVLEGIRIPNRVCARSRWPAVFTRVSVFVDWIHKVMRLG

SEQ ID NO: 143 - DNA, 1710 bp, Homo sapiens
  CDS (1)..(1704)
atgacttccaggtgctccggggcacagagctacctgctacatgcggtggtgcctgggccttggcaggaggatgtggcagatgctgaagagtgtgctggtcgctgtgggcccttaacggactgctgggccttccactacaatgtgagcagccatggttgccaactgctgccatggactcaacactcgccccactcaaggctgtggcattctgggcgctgtgacctcttccagaagaaagactacatacggacctgcatcatgaacaatggggttgggtaccggggcaccatggccacgaccgtgggtggcctgtcctgccaggcttggagccacaagttcccgaatgatcacaagtacatgcccacgctccggaatggcctggaagagaacttctgccataaccctgatggcgaccccggaggtccttggtgccacacaacagaccctgccgtgcgcttccagagctgcggcatcaaatcctgccgggtggccgcgtgtgtctggtgcaatggcgaggaataccgcggcgcggtagaccgcaccgagtcagggcgcgagtgccagcgctgggatcttcagcacccgcaccagcaccccttcgagccgggcaagtacctcgaccaaggtctggacgacaactattgccggaatcctgacggctccgagcggccatggtgctacactacggatccgcagatcgagcgagaattctgtgacctcccccgctgcggttccgaggcacagccccgccaagaggccacaagtgtcagctgcttccgcgggaagggtgagggctaccggggcacagccaataccaccaccgcgggcgtaccttgccagcgttgggacgcgcaaatcccgcatcagcaccgatttacgccagaaaaatacgcgtgcaaggaccttcgggagaacttctgccggaaccccgacggctcagaggcgccctggtgcttcacactgcggcccggcatgcgcgtgggcttttgctaccagatccggcgttgtacagacgacgtgcggccccaggactgctaccacggcgcgggggagcagtaccgcggcacggtcagcaagacccgcaagggtgtccagtgccagcgcgcgtccgctgagacgccgcacaagccgcagttcacgtttacctccgaaccgcatgcacaactggaggagaacttctgccaggacccagatggggatagccatgggccctggtgctacacgatggacccaaggaccccattcgactactgtgccctgcgacgctgcgctgatgaccagccgccatcaatcctggacccccccacagaccaggtgcagtttgagaagtgtggcaagagggtggatcggctggatcagcgtcgttccaagctgcgcgtggctgggggccatccgggcaactcaccctggacagtcagcttggggaatcggaggcagggccagcatttctgcggggggtctctagtgaaggagcagtggatactgactgcccggcagtgcttctcctcccatatgcctctcacgggctatgaggtatggttgggcaccctgttccagaacccacaacatggagagccaggcctacagcgggtcccagtagccaagatgctgtgtgggccctcaggctcccagcttgtcctgctcaagctggagagatctgtgaccctgaaccagcgtgtggccctgatctgcctgccgcctgaatgatat

SEQ ID NO: 144 - protein, 568 aa, Homo sapiens
MTSRCSGAQSYLLHAVVPGPWQEDVADAEECAGRCGPLTDCWAFHYNVSSHGCQLLPWTQHSPHSRLWHSGRCDLFQKKDYIRTCIMNNGVGYRGTMATTVGGLSCQAWSHKFPNDHKYMPTLRNGLEENFCHNPDGDPGGPWCHTTDPAVRFQSCGIKSCRVAACVWCNGEEYRGAVDRTESGRECQRWDLQHPHQHPFEPGKYLDQGLDDNYCRNPDGSERPWCYTTDPQIEREFCDLPRCGSEAQPRQEATSVSCFRGKGEGYRGTANTTTAGVPCQRWDAQIPHQHRFTPEKYACKDLRENFCRNPDGSEAPWCFTLRPGMRVGFCYQIRRCTDDVRPQDCYHGAGEQYRGTVSKTRKGVQCQRASAETPHKPQFTFTSEPHAQLEENFCQDPDGDSHGPWCYTMDPRTPFDYCALRRCADDQPPSILDPPTDQVQFEKCGKRVDRLDQRRSKLRVAGGHPGNSPWTVSLGNRRQGQHFCGGSLVKEQWILTARQCFSSHMPLTGYEVWLGTLFQNPQHGEPGLQRVPVAKMLCGPSGSQLVLLKLERSVTLNQRVALICLPPE

SEQ ID NO: 145 - DNA, 1011 bp, Homo sapiens
  CDS (7)..(1005)
aagctttgcatcatgaacaatggggttgggtaccggggcaccatggccacgaccgtgggtggcctgccctgccaggcttggagccacaagttcccaaatgatcacaagtacacgcccactctccggaatggcctggaagagaacttctgccgtaaccctgatggcgaccccggaggtccttggtgctacacaacagaccctgctgtgcgcttccagagctgcggcatcgaatcctgccgggaggccgcgtgtgtctggtgcaatggcgaggaataccgcggcgcggtagaccgcacggagtcagggcgcgagtgccagcgctgggatcttcagcacccgcaccagcaccccttcgagccgggcaagttcctcgaccaaggtctggacgacaactattgccggaatcctgacggctccgagcggccatggtgctacactacggatccgcagatcgagcgagagttctgtgacctcccccgctgcgggtccgaggcacagccccgccaagaggccacaactgtcagctgcttccgcgggaagggtgagggctaccggggcacagccaataccaccactgcgggcgtaccttgccagcgttgggacgcgcaaatccctcatcagcaccgatttacgccagaaaaatacgcgtgcaaagaccttcgggagaacttctgccggaaccccgacggctcagaggcgccctggtgcttcacactgcggcccggcatgcgcgcggccttttgctaccagatccggcgttgtacagacgacgtgcggccccagggggagcagtaccgcggcacggtcagcaagacccgcaagggtgtccagtgccagcgctggtccgctgagacgccgcacaagccgcagttcacgtttacctccgaaccgcatgcacaactggaggagaacttctgccggaacccagatggggatagccatgggccctggtgctacacgatggacccaaggaccccattcgactactgtgccctgcgacgctgcctcgag

SEQ ID NO: 146 - protein, 333 aa, Homo sapiens
CIMNNGVGYRGTMATTVGGLPCQAWSHKFPNDHKYTPTLRNGLEENFCRNPDGDPGGPWCYTTDPAVRFQSCGIESCREAACVWCNGEEYRGAVDRTESGRECQRWDLQHPHQHPFEPGKFLDQGLDDNYCRNPDGSERPWCYTTDPQIEREFCDLPRCGSEAQPRQEATTVSCFRGKGEGYRGTANTTTAGVPCQRWDAQIPHQHRFTPEKYACKDLRENFCRNPDGSEAPWCFTLRPGMRAAFCYQIRRCTDDVRPQGEQYRGTVSKTRKGVQCQRWSAETPHKPQFTFTSEPHAQLEENFCRNPDGDSHGPWCYTMDPRTPFDYCALRRC

SEQ ID NO: 147 - DNA, 1881 bp, Homo sapiens
  CDS (76)..(1776)
acacattactgacatgtatgcccacctgacctgcacccactcatgcccactctgcagggcagcgctcgccattgaatgacttccaggtgctccggggcacagagctacctgctacatgcggtggtgcctgggccttggcaggaggatgtggcagatgctgaagagtgtgctggtcgctgtgggcccttaacggactgctgggccttccactacaatgtgagcagccatggttgccaactgctgccatggactcaacactcgccccactcaaggctgtggcattctgggcgctgtgacctcttccagaagaaagactacatacggacctgcatcatgaacaatggggttgggtaccggggcaccatggccacgaccgtgggtggcctgtcctgccaggcttggagccacaagttcccgaatgatcacaagtacatgcccacgctccggaatggcctggaagagaacttctgccataaccctgatggcgaccccggaggtccttggtgccacacaacagaccctgccgtgcgcttccagagctgcggcatcaaatcctgccgggtggccgcgtgtgtctggtgcaatggcgaggaataccgcggcgcggtagaccgcaccgagtcagggcgcgagtgccagcgctgggatcttcagcacccgcaccagcaccccttcgagccgggcaggttcctcgaccaaggtctggacgacaactattgccggaatcctgacggctccgagcggccatggtgctacactacggatccgcagatcgagcgagaattctgtgacctcccccgctgcggttccgaggcacagccccgccaagaggccacaagtgtcagctgcttccgcgggaagggtgagggctaccggggcacagccaataccaccaccgcgggcgtaccttgccagcgttgggacgcgcaaatcccgcatcagcaccgatttacgccagaaaaatacgcgtgcaaggaccttcgggagaacttctgccggaacctcgacggctcagaggcgccctggtgcttcacactgcggcccggcatgcgcgtgggcttttgctaccagatccggcgttgtacagacgacgtgcggccccaggactgctaccacggcgcgggggagcagtaccgcggcacggtcagcaagacccgcaagggtgtccagtgccagcgcgcgtccgctgagacgccgcacaagccgcagttcacgtttacctccgaaccgcatgcacaactggaggagaacttctgccagaccccagatggggatagccatgggccctggtgctacacgatggacccaaggaccccattcgactactgtgccctgcgacgctgcgctgatgaccagccgccatcaatcctggacccccccgaccaggtgcagtttgagaagtgtggcaagagggtggatcggctggatcagcgtcgttccaagctgcgcgtggctgggggccatccgggcaactcaccctggacagtcagcttggggaatcggcagggccagcatttctgcggggggtctctagtgaaggagcagtggatactgactgcccggcagtgcttctcctcccagcatatgcctctcacgggctatgaggtatggttgggcaccctgttccagaacccacaacatggagagccaggcctacagcgggtcccagtagccaagatgctgtgtgggccctcaggctcccagcttgtcctgctcaagctggagaggtctgtgaccctgaaccagcgtgtggccctgatctgcctgccgcctgaatgatatgtggtgcctccagggaccaagtgtgagattgcaggccggggtgagaccaaaggtaagagcatagtgcacaggactgctggtggccaggaggcccagccc

SEQ ID NO: 148 - protein, 567 aa, Homo sapiens
MTSRCSGAQSYLLHAVVPGPWQEDVADAEECAGRCGPLTDCWAFHYNVSSHGCQLLPWTQHSPHSRLWHSGRCDLFQKKDYIRTCIMNNGVGYRGTMATTVGGLSCQAWSHKFPNDHKYMPTLRNGLEENFCHNPDGDPGGPWCHTTDPAVRFQSCGIKSCRVAACVWCNGEEYRGAVDRTESGRECQRWDLQHPHQHPFEPGRFLDQGLDDNYCRNPDGSERPWCYTTDPQIEREFCDLPRCGSEAQPRQEATSVSCFRGKGEGYRGTANTTTAGVPCQRWDAQIPHQHRFTPEKYACKDLRENFCRNLDGSEAPWCFTLRPGMRVGFCYQIRRCTDDVRPQDCYHGAGEQYRGTVSKTRKGVQCQRASAETPHKPQFTFTSEPHAQLEENFCQTPDGDSHGPWCYTMDPRTPFDYCALRRCADDQPPSILDPPDQVQFEKCGKRVDRLDQRRSKLRVAGGHPGNSPWTVSLGNRQGQHFCGGSLVKEQWILTARQCFSSQHMPLTGYEVWLGTLFQNPQHGEPGLQRVPVAKMLCGPSGSQLVLLKLERSVTLNQRVALICLPPE

SEQ ID NO: 149 - DNA, 1698 bp, Homo sapiens
  CDS (1)..(1695)
atgacttctaggtgctccggggcacagagctacctacaagcggtggtgcccgggccttggcaggaggatgtggcagatgctgaagagtgtgctggtcgctgtgggcccttaatggactgcgcgttccactacaatgtgagcagccatggttgccaactgctgccatggactcaacactcaccccacacgaggctgcggcattctgggcgctgtgacctcttccaggagaaagactacatacggacctgcatcatgaacaatggggttgggtaccggggcaccatggccacgaccgtgggtggcctgtcctgccaggcttggagccacaagttcccgaacgatcaccagtacatgcccacgctccggaatggcctggaagagaacttctgccgtaaccctgatggcgaccccggaggtccttggtgccacacaacagaccctgccgtgcgcttccagagctgcggcatcaaatcctgccgggtggccgcgtgtgtctggtgcaatggcgaggaataccgcggcgcggtagaccgcaccgagtcagggcgcgagtgccagcgctgggatcttcagcacccgcaccagcaccccttcgagccgggcaagttcctcgaccaaggtctggacgacaactattgccggaatcctgacggctccgagcggccatggtgctacactacggatccgcagatcgagcgagaattctgtgacctcccccgctgcggttccgaggcacagccccgccaagaggccacaagtgtcagctgcttccgcgggaagggtgagggctaccggggcacagccaataccaccaccgcgggcgtaccttgccagcgttgggacgcgcaaatcccgcatcagcaccgatttacgccagaaaaatacgcgtgcaaggaccttcgggagaacttctgccggaaccccgacggctcagaggcgccctggtgcttcacactgcggcccggcatgcgcgtgggcttttgctaccagatccggcgttgtacagacgacgtgcggccccaggactgctaccacggcgcgggggagcagtaccgcggcacggtcagcaagacccgcaagggtgtccagtgccagcgcgggtccgctgagacgccgcacaagccgcagttcacgtttacctccgaaccgcatgcacaactggaggagaacttctgccaggacccagatggggatagccatgggccctggtgctacacgatggacccaaggaccccattcgactactgtgccctgcgacgctgcgctgatgaccagccgccatcaatcctggacccccccgaccaggtgcagtttgagaagtgtggcaagagggtggatcggctggatcagcgttgttccaagctgcgcgtggctgggggccatccgggcaactcaccctggacagtcagcttgcggaataggcagggccagcatttctgcggggggtctctagtgaaggagcagtggatactgactgcccggcagtgcttctcctccagccatatgcctctcacgggctatgaggtatggttgggcaccctgttccagaacccacaacatggagagccaggcctacagcgggtcccagtagccaagatgctgtgtgggccctcaggctctcagcttgtcctgctcaagctggagaggtctgtgaccctgaaccagcgtgtggccctgatctgcctgccgcctgaatga

SEQ ID NO: 150 - protein, 565 aa, Homo sapiens
MTSRCSGAQSYLQAVVPGPWQEDVADAEECAGRCGPLMDCAFHYNVSSHGCQLLPWTQHSPHTRLRHSGRCDLFQEKDYIRTCIMNNGVGYRGTMATTVGGLSCQAWSHKFPNDHQYMPTLRNGLEENFCRNPDGDPGGPWCHTTDPAVRFQSCGIKSCRVAACVWCNGEEYRGAVDRTESGRECQRWDLQHPHQHPFEPGKFLDQGLDDNYCRNPDGSERPWCYTTDPQIEREFCDLPRCGSEAQPRQEATSVSCFRGKGEGYRGTANTTTAGVPCQRWDAQIPHQHRFTPEKYACKDLRENFCRNPDGSEAPWCFTLRPGMRVGFCYQIRRCTDDVRPQDCYHGAGEQYRGTVSKTRKGVQCQRGSAETPHKPQFTFTSEPHAQLEENFCQDPDGDSHGPWCYTMDPRTPFDYCALRRCADDQPPSILDPPDQVQFEKCGKRVDRLDQRCSKLRVAGGHPGNSPWTVSLRNRQGQHFCGGSLVKEQWILTARQCFSSSHMPLTGYEVWLGTLFQNPQHGEPGLQRVPVAKMLCGPSGSQLVLLKLERSVTLNQRVALICLPPE

SEQ ID NO: 151 - DNA, 2066 bp, Homo sapiens
  CDS (22)..(2031)
acaggtttcacaacttcccggatggggctgtggtgggtcacagtgcagcctccagccagaaggatggggtggctcccactcctgctgcttctgactcaatgcttaggggtccctgggcagcgctcgccattgaatgacttccaagtgctccggggcacagagctacagcacctgctacatgcggtggtgcccgggccttggcaggaggatgtggcagatgctgaagagtgtgctggtcgctgtgggcccttaatggactgccgggccttccactacaacgtgagcagccatggttgccaactgctgccatggactcaacactcgccccacacgaggctgcggcgttctgggcgctgtgacctcttccagaagaaagactacgtacggacctgcatcatgaacaatggggttgggtaccggggcaccatggccacgaccgtgggtggcctgccctgccaggcttggagccacaagttcccgaatgatcacaagtacacgcccactctccggaatggcctggaagagaacttctgccgtaaccctgatggcgaccccggaggtccttggtgctacacaacagaccctgctgtgcgcttccagagctgcggcatcaaatcctgccgggaggccgcgtgtgtctggtgcaatggcgaggaataccgcggcgcggtagaccgcacggagtcagggcgcgagtgccagcgctgggatcttcagcacccgcaccagcaccccttcgagccgggcaagttcctcgaccaaggtctggacgacaactattgccggaatcctgacggctccgagcggccatggtgctacactacggatccgcagatcgagcgagagttctgtgacctcccccgctgcgggtccgaggcacagccccgccaagaggccacaactgtcagctgcttccgcgggaagggtgagggctaccggggcacagccaataccaccactgcgggcgtaccttgccagcgttgggacgcgcaaatccctcatcagcaccgatttacgccagaaaaatacgcgtgcaaagaccttcgggagaacttctgccggaaccccgacggctcagaggcgccctggtgcttcacactgcggcccggcatgcgcgcggccttttgctaccagatccggcgttgtacagacgacgtgcggccccaggactgctaccacggcgcaggggagcagtaccgcggcacggtcagcaagacccgcaagggtgtccagtgccagcgctggtccgctgagacgccgcacaagccgcagttcacgtttacctccgaaccgcatgcacaactggaggagaacttctgccggaacccagatggggatagccatgggccctggtgctacacgatggacccaaggaccccattcgactactgtgccctgcgacgctgcgctgatgaccagccgccatcaatcctggaccccccagaccaggtgcagtttgagaagtgtggcaagagggtggatcggctggatcagcggcgttccaagctgcgcgtggttgggggccatccgggcaactcaccctggacagtcagcttgcggaatcggcagggccagcatttctgcggggggtctctagtgaaggagcagtggatactgactgcccggcagtgcttctcctcctgccatatgcctctcacgggctatgaggtatggttgggcaccctgttccagaacccacagcatggagagccaagcctacagcgggtcccagtagccaagatggtgtgtgggccctcaggctcccagcttgtcctgctcaagctggagagatctgtgaccctgaaccagcgtgtggccctgatctgcctgccccctgaatggtatgtggtgcctccagggaccaagtgtgagggtgactacgggggcccacttgcctgctttacccacaactgctgggtcctggaaggaattataatccccaaccgagtatgcgcaaggtcccgctggccagctgtcttcacgcgtgtctctgtgtttgtggactggattcacaaggtcatgagactgggttaggcccagccttgatgccatatgccttggggagg

SEQ ID NO: 152 - protein, 670 aa, Homo sapiens
MGLWWVTVQPPARRMGWLPLLLLLTQCLGVPGQRSPLNDFQVLRGTELQHLLHAVVPGPWQEDVADAEECAGRCGPLMDCRAFHYNVSSHGCQLLPWTQHSPHTRLRRSGRCDLFQKKDYVRTCIMNNGVGYRGTMATTVGGLPCQAWSHKFPNDHKYTPTLRNGLEENFCRNPDGDPGGPWCYTTDPAVRFQSCGIKSCREAACVWCNGEEYRGAVDRTESGRECQRWDLQHPHQHPFEPGKFLDQGLDDNYCRNPDGSERPWCYTTDPQIEREFCDLPRCGSEAQPRQEATTVSCFRGKGEGYRGTANTTTAGVPCQRWDAQIPHQHRFTPEKYACKDLRENFCRNPDGSEAPWCFTLRPGMRAAFCYQIRRCTDDVRPQDCYHGAGEQYRGTVSKTRKGVQCQRWSAETPHKPQFTFTSEPHAQLEENFCRNPDGDSHGPWCYTMDPRTPFDYCALRRCADDQPPSILDPPDQVQFEKCGKRVDRLDQRRSKLRVVGGHPGNSPWTVSLRNRQGQHFCGGSLVKEQWILTARQCFSSCHMPLTGYEVWLGTLFQNPQHGEPSLQRVPVAKMVCGPSGSQLVLLKLERSVTLNQRVALICLPPEWYVVPPGTKCEGDYGGPLACFTHNCWVLEGIIIPNRVCARSRWPAVFTRVSVFVDWIHKVMRLG

SEQ ID NO: 153 - DNA, 2412 bp, Homo sapiens
  CDS (126)..(1484)
atgggaagccagtaacactgtggcctactatctcttccgtggtgccatctacatttttgggactcgggaattatgaggtagaggtggaggcggagccggatgtcagaggtcctgaaatagtcaccatgggggaaaatgatccgcctgctgttgaagcccccttctcattccgatcgctttttggccttgatgatttgaaaataagtcctgttgcaccagatgcagatgctgttgctgcacagatcctgtcactgctgccattgaagttttttccaatcatcgtcattgggatcattgcattgatattagcactggccattggtctgggcatccacttcgactgctcagggaagtacagatgtcgctcatcctttaagtgtatcgagctgatagctcgatgtgacggagtctcggattgcaaagacggggaggacgagtaccgctgtgtccgggtgggtggtcagaatgccgtgctccaggtgttcacagctgcttcgtggaagaccatgtgctccgatgactggaagggtcactacgcaaatgttgcctgtgcccaactgggtttcccaagctatgtgagttcagataacctcagagtgagctcgctggaggggcagttccgggaggagtttgtgtccatcgatcacctcttgccagatgacaaggtgactgcattacaccactcagtatatgtgagggagggatgtgcctctggccacgtggttaccttgcagtgcacagcctgtggtcatagaaggggctacagctcacgcatcgtgggtggaaacatgtccttgctctcgcagtggccctggcaggccagccttcagttccagggctaccacctgtgcgggggctctgtcatcacgcccctgtggatcatcactgctgcacactgtgtttatgacttgtacctccccaagtcatggaccatccaggtgggtctagtttccctgttggacaatccagccccatcccacttggtggagaagattgtctaccacagcaagtacaagccaaagaggctgggcaatgacatcgcccttatgaagctggccgggccactcacgttcaatgaaatgatccagcctgtgtgcctgcccaactctgaagagaacttccccgatggaaaagtgtgctggacgtcaggatggggggccacagaggatggaggtgacgcctcccctgtcctgaaccacgcggccgtccctttgatttccaacaagatctgcaaccacagggacgtgtacggtggcatcatctccccctccatgctctgcgcgggctacctgacgggtggcgtggacagctgccagggggacagcggggggcccctggtgtgtcaagagaggaggctgtggaagttagtgggagcgaccagctttggcatcggctgcgcagaggtgaacaagcctggggtgtacacccgtgtcacctccttcctggactggatccacgagcagatggagagagacctaaaaacctgaagaggaaggggacaagtagccacctgagttcctgaggtgatgaagacagcccgatcctcccctggactcccgtgtaggaacctgcacacgagcagacacccttggagctctgagttccggcaccagtagcaggcccgaaagaggcacccttccatctgattccagcacaaccttcaagctgctttttgttttttgtttttttgaggtggagtctcgctctgttgcccaggctggagtgcagtggcgaaatccctgctcactgcagcctccgcttccctggttcaagcgattctcttgcctcagcttccccagtagctgggaccacaggtgcccgccaccacacccaactaatttttgtatttttagtagagacagggtttcaccatgttggccaggctgctctcaaacccctgacctcaaatgatgtgcctgcttcagcctcccacagtgctgggattacaggcatgggccaccacgcctagcctcacgctcctttctgatcttcactaagaacaaaagaagcagcaacttgcaagggcggcctttcccactggtccatctggttttctctccagggtcttgcaaaattcctgacgagataagcagttatgtgacctcacgtgcaaagccaccaacagccactcagaaaagacgcaccagcccagaagtgcagaactgcagtcactgcacgttttcatctctagggaccagaaccaaacccaccctttctacttccaagacttattttcacatgtggggaggttaatctaggaatgactcgtttaaggcctattttcatgatttctttgtagcatttggtgcttgacgtattattgtcctttgattccaaataatatgtttccttccctcattgtctggcgtgtctgcgtggactggtgacgtgaatcaaaatcatccactgaaa

SEQ ID NO: 154 - protein, 453 aa, Homo sapiens
MGENDPPAVEAPFSFRSLFGLDDLKISPVAPDADAVAAQILSLLPLKFFPIIVIGIIALILALAIGLGIHFDCSGKYRCRSSFKCIELIARCDGVSDCKDGEDEYRCVRVGGQNAVLQVFTAASWKTMCSDDWKGHYANVACAQLGFPSYVSSDNLRVSSLEGQFREEFVSIDHLLPDDKVTALHHSVYVREGCASGHVVTLQCTACGHRRGYSSRIVGGNMSLLSQWPWQASLQFQGYHLCGGSVITPLWIITAAHCVYDLYLPKSWTIQVGLVSLLDNPAPSHLVEKIVYHSKYKPKRLGNDIALMKLAGPLTFNEMIQPVCLPNSEENFPDGKVCWTSGWGATEDGGDASPVLNHAAVPLISNKICNHRDVYGGIISPSMLCAGYLTGGVDSCQGDSGGPLVCQERRLWKLVGATSFGIGCAEVNKPGVYTRVTSFLDWIHEQMERDLKT

SEQ ID NO: 155 - DNA, 1167 bp, Homo sapiens
  CDS (1)..(1167)
ggtaccatccacttcgactgctcagggaagtacagatgtcgctcatcctttaagtgtatcgagctgatagctcgatgtgacggagtctcggattgcaaagacggggaggacgagtaccgctgtgtccgggtgagtggtcagaatgccgtgctccaggtgttcacagctgcttcgtggaagaccatgtgctccgatgactggaagggtcactacgcaaatgttgcctgtgcccaactgggtttcccaagctatgtgagttcagataacctcagagtgagctcgctggaggggcagttccgggaggagtttgtgtccatcgatcacctcttgccagatgacaaggtgactgcattacaccactcagtatatgtgagggagggatgtgcctctggccacgtggttaccttgcagtgcacagcctgtggtcatagaaggggctacagctcacgcatcgtgggtggaaacatgtccttgctctcgcagtggccctggcaggccagccttcagttccagggctaccacctgtgcgggggctctgtcatcacgcccctgtggatcatcactgctgcacactgtgtttatgatttgtacctccccaagtcatggaccatccaggtgggtctagtttccctgttggacaatccagccccatcccacttggtggagaagattgtctaccacagcaagtacaagccaaagaggctgggcaatgacatcgcccttatgaagctggccgggccactcacgttcaatgaaatgatccagcctgtgtgcctgcccaactctgaagagaacttccccgatggaaaagtgtgctggacgtcaggatggggggccacagaggatggaggtgacgcctcccctgtcctgaaccacgcggccgtccctttgatttccaacaagatctgcaaccacagggacgtgtacggtggcatcatctccccctccatgctctgcgcgggctacctgacgggtggcgtggacagctgccagggggacagcggggggcccctggtgtgtcaagagaggaggctgtggaagttagtgggagcgaccagctttggcatcggctgcgcagaggtgaacaagcctggggtgtacacccgtgtcacctccttcctggactggatccacgagcagatggagagagacctaaaaaccctcgag

SEQ ID NO: 156 - protein, 389 aa, Homo sapiens
GTIHFDCSGKYRCRSSFKCIELIARCDGVSDCKDGEDEYRCVRVSGQNAVLQVFTAASWKTMCSDDWKGHYANVACAQLGFPSYVSSDNLRVSSLEGQFREEFVSIDHLLPDDKVTALHHSVYVREGCASGHVVTLQCTACGHRRGYSSRIVGGNMSLLSQWPWQASLQFQGYHLCGGSVITPLWIITAAHCVYDLYLPKSWTIQVGLVSLLDNPAPSHLVEKIVYHSKYKPKRLGNDIALMKLAGPLTFNEMIQPVCLPNSEENFPDGKVCWTSGWGATEDGGDASPVLNHAAVPLISNKICNHRDVYGGIISPSMLCAGYLTGGVDSCQGDSGGPLVCQERRLWKLVGATSFGIGCAEVNKPGVYTRVTSFLDWIHEQMERDLKTLE

SEQ ID NO: 157 - DNA, 3149 bp, Homo sapiens
  CDS (39)..(2696)
ctaaagtttttttctttgaatgacagaactacagcataatgcgtggcttcaacctgctcctcttctggggatgttgtgttatgcacagctgggaagggcacataagacccacacggaaaccaaacacaaagggtaataactgtagagacagtaccttgtgcccagcttatgccacctgcaccaatacggtggacagttactattgcacttgcaaacaaggcttcctgtccagcaatgggcaaaatcacttcaaggatccaggagtgcgatgcaaagatattgatgaatgttctcaaagcccccagccctgtggtcctaactcatcctgcaaaaacctgtcagggaggtacaagtgcagctgtttagatggtttctcttctcccactggaaatgactgggtcccaggaaagccgggcaatttctcctgtactgatatcaatgagtgcctcaccagcagggtctgccctgagcattctgactgtgtcaactccatgggaagctacagttgcagctgtcaagttggattcatctctagaaactccacctgtgaagacgtgaatgaatgtgcagatccaagagcttgcccagagcatgcaacttgtaataacactgttggaaactactcttgtttctgcaacccaggatttgaatccagcagtggccacttgagttgccagggtctcaaagcatcgtgtgaagatattgatgaatgcactgaaatgtgccccatcaattcaacatgcaccaacactcctgggagctacttttgcacctgccaccctggctttgcaccaagcagtggacagttgaatttcacagaccaaggagtggaatgtagagatattgatgagtgccgccaagatccatcaacctgtggtcctaattctatctgcaccaatgccctgggctcctacagctgtggctgcattgtaggctttcatcccaatccagaaggctcccagaaagatggcaacttcagctgccaaagggttctcttcaaatgtaaggaagatgtgatacccgataataagcagatccagcaatgccaagagggaaccgcagtgaaacctgcatatgtctccttttgtgcacaaataaataacatcttcagcgttctggacaaagtgtgtgaaaataaaacgaccgtagtttctctgaagaatacaactgagagctttgtccctgtgcttaaacaaatatccatgtggactaaattcaccaaggaagagacgtcctccctggccacagtcttcctggagagtgtggaaagcatgacactggcatctttttggaaaccctcagcaaatgtcactccggctgttcgggcggaatacttagacattgagagcaaagttatcaacaaagaatgcagtgaagagaatgtgacgttggacttggtagccaagggggataagatgaagatcgggtgttccacaattgaggaatctgaatccacagagaccactggtgtggcttttgtctcctttgtgggcatggaatcggttttaaatgagcgcttcttccaagaccaccaggctcccttgaccacctctgagatcaagctgaagatgaattctcgagtcgttgggggcataatgactggagagaagaaagacggcttctcagatccaatcatctacactctggagaacgttcagccaaagcagaagtttgagaggcccatctgtgtttcctggagcactgatgtgaagggtggaagatggacatcctttggctgtgtgatcctggaagcttctgagacatataccatctgcagctgtaatcagatggcaaatcttgccgttatcatggcgtctggggagctcacgatggacttttccttgtacatcattagccatgtaggcattatcatctccttggtgtgcctcgtcttggccatcgccacctttctgctgtgtcgctccatccgaaatcacaacacctacctccacctgcacctctgcgtgtgtctcctcttggcgaagactctcttcctcgccggtatacacaagactgacaacaagacgggctgcgccatcatcgcgggcttcctgcactaccttttccttgcctgcttcttctggatgctggtggaggctgtgatactgttcttgatggtcagaaacctgaaggtggtgaattacttcagctctcgcaacatcaagatgctgcacatctgtgcctttggttatgggctgccgatgctggtggtggtgatctctgccagtgtgcagccacagggctatggaatgcataatcgctgctggctgaatacagagacagggttcatctggagtttcttggggccagtttgcacagttatagtgatcaactcccttctcctgacctggaccttgtggatcctgaggcagaggctttccagtgttaatgccgaagtctcaacgctaaaagacaccaggttactgaccttcaaggcctttgcccagctcttcatcctgggctgctcctgggtgctgggcatttttcagattggacctgtggcaggtgtcatggcttacctgttcaccatcatcaacagcctgcagggggccttcatcttcctcatccactgtctgctcaacggccaggtacgagaagaatacaagaggtggatcactgggaagacgaagcccagctcccagtcccagacctcaaggatcttgctgtcctccatgccatccgcttccaagacgggttaaagcctttcttgctttcaaatatgctatggagccacagttgaggacagtagtttcctgcaggagcctaccctgaaatctcttctcagcttaacatggaaatgaggatcccaccagccccagaaccctctggggaagaatgttgggggccgtcttcctgtggttgtatgcactgatgagaaatcagacgtttctgctccaaacgaccattttatcttcgtgctctgcaacttcttcaattccagagtttctgagaacagacccaaattcaatggcatgaccaagaacacctggctaccattttgttttctcctgcccttgttggtgcatggttctaagcgtgcccctccagcgcctatcatacgcctgacacagagaacctctcaataaatgatttgtcgcctgtctgactgatttaccctaaaaaaaaaaaaaaaaaaaaaaaaaaaaaaa

SEQ ID NO: 158 - protein, 886 aa, Homo sapiens
MRGFNLLLFWGCCVMHSWEGHIRPTRKPNTKGNNCRDSTLCPAYATCTNTVDSYYCTCKQGFLSSNGQNHFKDPGVRCKDIDECSQSPQPCGPNSSCKNLSGRYKCSCLDGFSSPTGNDWVPGKPGNFSCTDINECLTSRVCPEHSDCVNSMGSYSCSCQVGFISRNSTCEDVNECADPRACPEHATCNNTVGNYSCFCNPGFESSSGHLSCQGLKASCEDIDECTEMCPINSTCTNTPGSYFCTCHPGFAPSSGQLNFTDQGVECRDIDECRQDPSTCGPNSICTNALGSYSCGCIVGFHPNPEGSQKDGNFSCQRVLFKCKEDVIPDNKQIQQCQEGTAVKPAYVSFCAQINNIFSVLDKVCENKTTVVSLKNTTESFVPVLKQISMWTKFTKEETSSLATVFLESVESMTLASFWKPSANVTPAVRAEYLDIESKVINKECSEENVTLDLVAKGDKMKIGCSTIEESESTETTGVAFVSFVGMESVLNERFFQDHQAPLTTSEIKLKMNSRVVGGIMTGEKKDGFSDPIIYTLENVQPKQKFERPICVSWSTDVKGGRWTSFGCVILEASETYTICSCNQMANLAVIMASGELTMDFSLYIISHVGIIISLVCLVLAIATFLLCRSIRNHNTYLHLHLCVCLLLAKTLFLAGIHKTDNKTGCAIIAGFLHYLFLACFFWMLVEAVILFLMVRNLKVVNYFSSRNIKMLHICAFGYGLPMLVVVISASVQPQGYGMHNRCWLNTETGFIWSFLGPVCTVIVINSLLLTWTLWILRQRLSSVNAEVSTLKDTRLLTFKAFAQLFILGCSWVLGIFQIGPVAGVMAYLFTIINSLQGAFIFLIHCLLNGQVREEYKRWITGKTKPSSQSQTSRILLSSMPSASKTG

SEQ ID NO: 159 - DNA, 2851 bp, Homo sapiens
  CDS (13)..(2445)
gctcctcttctggggtgttgtgttatgcacagctgggaagggcacataagacccacacggaaaccaaacacaaagggtaataactgtagagacagtaccttgtgcccagcttatgccacctgcaccaatacagtggacagttactattgcgcttgcaaacaaggcttcctgtccagcaatgggcaaaatcacttcaaggatccaggagtgcgatgcaaagatattgatgaatgttctcaaagcccccagccctgtggtcctaactcatcctgcaaaaacctgtcagggaggtacaagtgcagctgtttagatggtttctcttctcccactggaaatgactgggtcccaggaaagccgggcaatttctcctgtactgatatcaatgagtgcctcaccagcagcgtctgccctgagcattctgactgtgtcaactccatgggaagctacagttgtagctgtcaagttggattcatctctagaaactccacctgtgaagacgtggatgaatgtgcagatccaagagcttgcccagagcatgcaacttgtaataacactgttggaaactactcttgtttctgcaacccaggatttgaatccagcagtggccacttgagtttccagggtctcaaagcatcgtgtgaagatattgatgaatgcactgaaatgtgccccatcaattcaacatgcaccaacactcctgggagctacttttgcacctgccaccctggctttgcaccaagcaatggacagttgaatttcacagaccaaggagtggaatgtagagatattgatgagtgccgccaagatccatcaacctgtggtcctaattctatctgcaccaatgccctgggctcctgcagctgtggctgcattgcaggctttcatcccaatccagaaggctcccagaaagatggcaacttcagctgccaaagggttctcttcaaatgtaaggaagatgtgatacccgataataagcagatccagcaatgccaagagggaaccgcagtgaaacctgcatatgtctccttttgtgcacaaataaataacatcttcagcgttctggacaaagtgtgtgaaaataaaacgaccgtagtttctctgaagaatacaactgagagctttgtccctgtgcttaaacaaatatccacgtggactaaattcaccaaggaagagacgtcctccctggccacagtcttcctggagagtgtggaaagcatgacactggcatctttttggaaaccctcagcaaatgtcactccggctgttcggacggaatacttagacattgagagcaaagttatcaacaaagaatgcagtgaagagaatgtgacgttggacttggtagccaagggggataagatgaagatcgggtgttccacaattgaggaatctgaatccacagagaccactggtgtggcttttgtctcctttgtgggcatggaatcggttttaaatgagcgcttcttccaagaccaccaggctcccttgaccacctctgagatcaagctgaagatgaattctcgagtcgttgggggcataatgactggagagaagaaagacggcttctcagatccaattatctacactctggagaacgttcagccaaagcagaagtttgagaggcccatctgtgtttcctggagcactgatgtgaagggtggaagatggacatcctttggctgtgtgatcctggaagcttctgagacatataccatctgcagctgtaatcagatggcaaatcttgccgttatcatggcgtctggggagctcacgatgggctgcgccatcatcgcgggcttcctgcactaccttttccttgcctgcttcttctggatgctggtggaggctgtgatactgttcttgatggtcagaaacctgaaggtggtgaattacttcagctctcgcaacatcaagatgctgcacatctgtgcctttggttatgggctgccgatgctggtggtggtgatctctgccagtgtgcagccacagggctatggaatgcataatcgctgctggctgaatacagagacagggttcatctggagtttcttggggccagtttgcacagttatagtgatcaactcccttctcctgacctggaccttgtggatcctgaggcagaggctttccagtgttaatgccgaagtctcaacgctaaaagacaccaggttactgaccttcaaggcctttgcccagctcttcatcctgggctgctcctgggtgctgggcatttttcagattggacctgtggcaggtgtcatggcttacctgttcaccatcatcaacagcctgcagggggccttcatcttcctcatccactgtctgctcaacggccaggtacgagaagaatacaagaggtggatcactgggaagacgaagcccagctcccagtcccagacctcaaggatcttgctgtcctccatgccatccgcttccaagacgggttaaagtcctttcttgctttcaaatatgctatggagccacagttgaggacagtagtttcctgcaggagcctaccctgaaatctcttctcagcttaacatggaaatgaggatcccaccagccccagaaccctctggggaagaatgttgggggccgtcttcctgtggttgtatgcactgatgagaaatcaggcgtttctgctccaaacgaccattttatcttcgtgctctgcaacttcttcaattccagagtttctgagaacagacccaaattcaatggcatgaccaagaacacctggctaccattttgttttctcctgcccttgttggtgcatggttctaagcgtgcccctccagcgcctatcatacgcctgacacagagaacctctcaataaatgatttgtcgcctg

SEQ ID NO: 160 - protein, 811 aa, Homo sapiens
GCCVMHSWEGHIRPTRKPNTKGNNCRDSTLCPAYATCTNTVDSYYCACKQGFLSSNGQNHFKDPGVRCKDIDECSQSPQPCGPNSSCKNLSGRYKCSCLDGFSSPTGNDWVPGKPGNFSCTDINECLTSSVCPEHSDCVNSMGSYSCSCQVGFISRNSTCEDVDECADPRACPEHATCNNTVGNYSCFCNPGFESSSGHLSFQGLKASCEDIDECTEMCPINSTCTNTPGSYFCTCHPGFAPSNGQLNFTDQGVECRDIDECRQDPSTCGPNSICTNALGSCSCGCIAGFHPNPEGSQKDGNFSCQRVLFKCKEDVIPDNKQIQQCQEGTAVKPAYVSFCAQINNIFSVLDKVCENKTTVVSLKNTTESFVPVLKQISTWTKFTKEETSSLATVFLESVESMTLASFWKPSANVTPAVRTEYLDIESKVINKECSEENVTLDLVAKGDKMKIGCSTIEESESTETTGVAFVSFVGMESVLNERFFQDHQAPLTTSEIKLKMNSRVVGGIMTGEKKDGFSDPIIYTLENVQPKQKFERPICVSWSTDVKGGRWTSFGCVILEASETYTICSCNQMANLAVIMASGELTMGCAIIAGFLHYLFLACFFWMLVEAVILFLMVRNLKVVNYFSSRNIKMLHICAFGYGLPMLVVVISASVQPQGYGMHNRCWLNTETGFIWSFLGPVCTVIVINSLLLTWTLWILRQRLSSVNAEVSTLKDTRLLTFKAFAQLFILGCSWVLGIFQIGPVAGVMAYLFTIINSLQGAFIFLIHCLLNGQVREEYKRWITGKTKPSSQSQTSRILLSSMPSASKTG

SEQ ID NO: 161 - DNA, 1764 bp, Homo sapiens
  CDS (1)..(1764)
agatcttgggaagggcacataagacccacacggaaaccaaacacaaagggtaataactgtagagacagtaccttgtgcccagcttatgccacctgcaccaatacagtggacagttactattgcacttgcaaacaaggcttcctgtccagcaatgggcaaaatcacttcaaggatccaggagtgcgatgcaaagatattgatgaatgttctcaaagcccccagccctgtggtcctaactcatcctgcaaaaacctgtcagggaggtacaagtgcagctgtttagatggtttctcttctcccactggaaatgactgggtcccaggaaagccgggcaatttctcctgtactgatatcaatgagtgcctcaccagcagggtctgccctgagcattctgactgtgtcaactccatgggaagctacagttgcagctgtcaagttggattcatctctagaaactccacctgtggagacgtgaatgaatgtgcagatccaagagcttgcccagagcatgcaacttgtaataacactgttggaaactactcttgtttctgcaacccaggatttgaatccagcagtggccacttgagtttccagggtctcaaagcatcgtgtgaagatattgatgaatgcactgaaatgtgccccatcaattcaacatgcaccaacactcctgggagctacttttgcacctgccaccctggctttgcaccaagcaatggacagttgaatttcacagaccaaggagtggaatgtagagatattgatgagtgccgccaagatccatcaacctgtggtcctaattctatctgcaccaatgccctgggctcctacagctgtggctgcattgtaggctttcatcccaatccagaaggctcccagaaagatggcaacttcagctgtcaaagggttctcttcaaatgtaaggaagatgtgatacccgataataagcagatccagcaatgccaagagggaaccgcagtgaaacctgcatatgtctccttttgtgcacaaataaataacatcttcagcgttctggacaaagtgtgtgaaaataaaacgaccgtagtttctctgaagaatacaactgagagctttgtccctgtgcttaaacaaatatccacgtggactaaattcaccaaggaagagacgtcctccctggccacagtcttcctggagagtgtggaaagcatgacactggcatctttttggaaaccctcagcaaatgtcactccggctgttcggacggaatacttagacattgagagcaaagttatcaacaaagaatgcagtgaagagaatgtgacgttggacttggtagccaagggggataagatgaagatcgggtgttccacaattgaggaatctgaatccacagagaccactggtgtggcttttgtctcctttgtgggcatggaatcggttttaaatgagcgcttcttccaagaccaccaggctcccttgaccacctctgagatcaagctgaagatgaattctcgagtcgttgggggcataatgactggagagaagaaagacggcttctcagatccaatcatctacactctggagaacgttcagccaaagcagaagtttgagaggcccatctgtgtttcctggagcactgatgtgaagggtggaagatggacatcctttggctgtgtgatcctggaagcttctgagacatataccatctgcagctgtaatcagatggcaaatcttgccgttatcatggcgtctggggagctcacggtcgacaagggcgaattt

SEQ ID NO: 162 - protein, 588 aa, Homo sapiens
RSWEGHIRPTRKPNTKGNNCRDSTLCPAYATCTNTVDSYYCTCKQGFLSSNGQNHFKDPGVRCKDIDECSQSPQPCGPNSSCKNLSGRYKCSCLDGFSSPTGNDWVPGKPGNFSCTDINECLTSRVCPEHSDCVNSMGSYSCSCQVGFISRNSTCGDVNECADPRACPEHATCNNTVGNYSCFCNPGFESSSGHLSFQGLKASCEDIDECTEMCPINSTCTNTPGSYFCTCHPGFAPSNGQLNFTDQGVECRDIDECRQDPSTCGPNSICTNALGSYSCGCIVGFHPNPEGSQKDGNFSCQRVLFKCKEDVIPDNKQIQQCQEGTAVKPAYVSFCAQINNIFSVLDKVCENKTTVVSLKNTTESFVPVLKQISTWTKFTKEETSSLATVFLESVESMTLASFWKPSANVTPAVRTEYLDIESKVINKECSEENVTLDLVAKGDKMKIGCSTIEESESTETTGVAFVSFVGMESVLNERFFQDHQAPLTTSEIKLKMNSRVVGGIMTGEKKDGFSDPIIYTLENVQPKQKFERPICVSWSTDVKGGRWTSFGCVILEASETYTICSCNQMANLAVIMASGELTVDKGEF

SEQ ID NO: 163 - DNA, 4080 bp, Homo sapiens
  CDS (461)..(3142)
gagtggagttctggaggaatgtttaccagacacagagcccagagggacagcgcccagagcccagatagagagacacggcctcactggctcagcaccagggtccccttccccctcctcagctccctccctggcccctttaagaaagagctgatcctctcctctcttgagttaacccctgattgtccaggtggcccctggctctggcctggtgggcggaggcaaagggggagccaggggcggagaaagggttgcccaagtctgggagtgagggaaggaggcaggggtgctgagaaggcggctgctgggcagagccggtggcaagggcctcccctgccgctgtgccaggcaggcagtgccaaatccggggagcctggagctggggggagggccggggacagcccggcccgctgccccctcccccgctgggagcccagcaacttctgaggaaagtttggcacccatggcgtggcggtgccccaggatgggcagggtcccgctggcctggtgcttggcgctgtgcggctgggcgtgcatggcccccaggggcacgcaggctgaagaaagtcccttcgtgggcaacccagggaatatcacaggtgcccggggactcacgggcacccttcggtgtcagctccaggttcagggagagccccccgaggtacattggcttcgggatggacagatcctggagctcgcggacagcacccagacccaggtgcccctgggtgaggatgaacaggatgactggatagtggtcagccagctcagaatcacctccctgcagctttccgacacgggacagtaccagtgtttggtgtttctgggacatcagaccttcgtgtcccagcctggctatgttgggctggagggcttgccttacttcctggaggagcccgaagacaggactgtggccgccaacacccccttcaacctgagctgccaagctcagggacccccagagcccgtggacctactctggctccaggatgctgtccccctggccacggctccaggtcacggcccccagcgcagcctgcatgttccagggctgaacaagacatcctctttctcctgcgaagcccataacgccaagggggtcaccacatcccgcacagccaccatcacagtgctcccccagcagccccgtaacctccacctggtctcccgccaacccacggagctggaggtggcttggactccaggcctgagcggcatctaccccctgacccactgcaccctgcaggctgtgctgtcagacgatgggatgggcatccaggcgggagaaccagaccccccagaggagcccctcacctcgcaagcatccgtgcccccccatcagcttcggctaggcagcctccatcctcaccccccttatcacatccgcgtggcatgcaccagcagccagggcccctcatcctggacccactggcttcctgtggagacgccggagggagtgcccctgggcccccctgagaacattagtgctacgcggaatgggagccaggccttcgtgcattggcaagagccccgggcgcccctgcagggtaccctgttagggtaccggctggcgtatcaaggccaggacaccccagaggtgctaatggacatagggctaaggcaagaggtgaccctggagctgcagggggacgggtctgtgtccaatctgacagtgtgtgtggcagcctacactgctgctggggatggaccctggagcctcccagtacccctggaggcctggcgcccaggggaagcacagccagtccaccagctggtgaaggaaccttcaactcctgccttctcgtggccctggtggtatgtactgctaggagcagtcgtggccgctgcctgtgtcctcatcttggctctcttccttgtccaccggcgaaagaaggagacccgttatggagaagtgtttgaaccaacagtggaaagaggtgaactggtagtcaggtaccgcgtgcgcaagtcctacagtcgtcggaccactgaagctaccttgaacagcctgggcatcagtgaagagctgaaggagaagctgcgggatgtgatggtggaccggcacaaggtggccctggggaagactctgggagagggagagtttggagctgtgatggaaggccagctcaaccaggacgactccatcctcaaggtggctgtgaagacgatgaagattgccatctgcacgaggtcagagctggaggatttcctgagtgaagcggtctgcatgaaggaatttgaccatcccaacgtcatgaggctcatcggtgtctgtttccagggttctgaacgagagagcttcccagcacctgtggtcatcttacctttcatgaaacatggagacctacacagcttcctcctctattcccggctcgggggccagccagtgtacctgcccactcagatgctagtgaagttcatggcagacatcgccagtggcatggagtatctgagtaccaagagattcatacaccgggacctggcggccaggaactgcatgctgaatgagaacatgtccgtgtgtgtggcggacttcgggctctccaagaagatctacaatggggactactaccgccagggacgtatcgccaagatgccagtcaagtggattgccattgagagtctagctgaccgtgtctacaccagcaagagcgatgtgtggtccttcggggtgacaatgtgggagattgccacaagaggccaaaccccatatccgggcgtggagaacagcgagatttatgactatctgcgccagggaaatcgcctgaagcagcctgcggactgtctggatggactgtatgccttgatgtcgcggtgctgggagctaaatccccaggaccggccaagttttacagagctgcgggaagatttggagaacacactgaaggccttgcctcctgcccaggagcctgacgaaatcctctatgtcaacatggatgagggtggaggttatcctgaaccccctggagctgcaggaggagctgaccccccaacccagccagaccctaaggattcctgtagctgcctcactgcggctgaggtccatcctgctggacgctatgtcctctgcccttccacaacccctagccccgctcagcctgctgataggggctccccagcagccccagggcaggaggatggtgcctgagacaaccctccacctggtactccctctcaggatccaagctaagcactgccactgggggaaactccaccttcccactttcccaccccacgccttatccccacttgcagccctgtcttcctacctatcccacctccatcccagacaggtccctggccttctctgtgcagtagcatcaccttgaaagcagtagcatcaccatctgtaaaaggaaggggttggattgcaatatctgaagccctcccaggtgttaacattccaagactctagagtccaaggtttaaagagtctagattcaaaggttctaggtttcaaagatgctgtgagtctttggttctaaggacctgaaattccaaagtctctaattctattaaagtgctaaggttctaaggcctacttttttttttttttttttttttttttttttttttgcgatagagtctcactgtgtcacccaggctggagtgcagtggtgcaatctcgcctcactgcaaccttcacctaccgagttcaagtgattttcctgccttggcctcccaagtagctgggattacaggtgtgtgccaccacacccggctaatttttatatttttagtagagacagggtttcaccatgttggccaggctggtctaaaactcctgacctcaagtgatctgcccacctcagcctcccaaagtgctgagattacaggcatgagccactgcactcaaccttaagacctactgttctaaagctctgacattatgtggttttagattttctggttctaacatttttgataaagcctcaaggttttaggttctaaagttctaagattctgattttaggagctaaggctctatgagtctagatgtttattcttctagagttcagagtccttaaaatgtaagattatagattctaaagattctatagttctagacatggaggttctaag

SEQ ID NO: 164 - protein, 894 aa, Homo sapiens [sequence omitted]

SEQ ID NO: 165 - DNA, 2196 bp, Homo sapiens
  CDS (28)..(2112)
agcaacttctgaggaaagtttgcacccatggcgtggcggtgccccaggatgggcagggtcccgctggcctggtgcttggcgctgtgcggctgggcgtgcatggcccccaggggcacgcaggctgaagaaagtcccttcgtgggcaacccagggaatatcacaggtgcccgtgagtccccgggcacccttcggtgtcagctccaggttcagggagagccccccgaggtacattggcttcgggatggacagatcctggagctcgcggacagcacccagacccaggtgcccctgggtgaggatgaacaggatgactggatagtggtcagccagctcagaatcacctccctgcagctttccgacacgggacagtaccagtgtttggtgtttctgggacatcagaccttcgtgtcccagcctggctatgttgggctggagggcttgccttacttcctggaggagcccgaagacaggactgtggccgccaacacccccttcaacctgagctgccaagctcagggacccccagagcccgtggacctactctggctccaggatgctgtccccctggccacggctccaggtcacggcccccagcgcagcctgcatgttccagggctgaacaagacatcctctttctcctgcgaagcccataacgccaagggggtcaccacatcccgcacagccaccatcacagtgctcccccagcagccccgtaacctccacctggtctcccaccagctggtgaaggaatcttcaactcctgccttctcgtggccctggtggtatgtactgctaggagcagtcgtggccgctgcctgtgtcctcatcttggctctcttccttgtccaccggcgaaagaaggagacccgttatggagaagtgtttgaaccaacagtggatagaggtgaactggtagtcaggtaccgcgtgcgcaagtcctacagtcgtcggaccactgaagctaccttgaacagcctgggcatcagtgaagagctgaaggagaagctgcgggatgtgatggtggaccggcacaaggtggccctggggaagactctgggagagggagagtttggagctgtgatggaaggccagctcaaccaggacgactccatcctcaaggtggctgtgaagacgatgaagattgccatctgcacgaggtcagagctggaggatttcctgagtgaagcggtctgcatgaaggaatttgaccatcccaacgtcatgaggctcatcggtgtctgtttccagggttctgaacgagagagcttcccagcacctgtggtcatcttacctttcatgaaacatggagacctacacagcttcctcctctattcccggctcggggaccagccagtgtacctgcccactcagatgctagtgaagttcatggcagacatcgccagtggcatggagtatctgagtaccaagagattcatacaccgggacctggcggccaggaactgcatgctgaatgagaacatgtccgtgtgtgtggcggacttcgggctctccaagaagatctacaatggggactactaccgccagggacgtatcgccaagatgccagtcaagtggattgccattgagagtctagctgaccgtgtctacaccagcaagagcgatgtgtggtccttcggggtgacaatgtgggagattgccacaagaggccaaaccccatatccgggcgtggagaacagcgagatttatgactatctgcgccagggaaatcgcctgaagcagcctgcggactgtctggatggactgtatgccttgatgtcgcggtgctgggagctaaatccccaggaccggccaagttttacagagctgcgggaagatttggagaacacactgaaggccttgcctcctgcccaggagcctgacgaaatcctctatgtcaacatggatgagggtggaggttatcctgaaccccctggagctgcaggaggagctgaccccccaacccagccagaccctaaggattcctgtagctgcctcactgcggctgaggtccatcctgctggacgctatgtcctctgcccttccacaacccctagccccgctcagcctgctgataggggctccccagcagccccagggcaggaggatggtgcctgagacaaccctccacctggtactccctctcaggatccaagctaagcactgccactggggaaaactccaccttcccactttccc

SEQ ID NO: 166 - protein, 695 aa, Homo sapiens
MAWRCPRMGRVPLAWCLALCGWACMAPRGTQAEESPFVGNPGNITGARESPGTLRCQLQVQGEPPEVHWLRDGQILELADSTQTQVPLGEDEQDDWIVVSQLRITSLQLSDTGQYQCLVFLGHQTFVSQPGYVGLEGLPYFLEEPEDRTVAANTPFNLSCQAQGPPEPVDLLWLQDAVPLATAPGHGPQRSLHVPGLNKTSSFSCEAHNAKGVTTSRTATITVLPQQPRNLHLVSHQLVKESSTPAFSWPWWYVLLGAVVAAACVLILALFLVHRRKKETRYGEVFEPTVDRGELVVRYRVRKSYSRRTTEATLNSLGISEELKEKLRDVMVDRHKVALGKTLGEGEFGAVMEGQLNQDDSILKVAVKTMKIAICTRSELEDFLSEAVCMKEFDHPNVMRLIGVCFQGSERESFPAPVVILPFMKHGDLHSFLLYSRLGDQPVYLPTQMLVKFMADIASGMEYLSTKRFIHRDLAARNCMLNENMSVCVADFGLSKKIYNGDYYRQGRIAKMPVKWIAIESLADRVYTSKSDVWSFGVTMWEIATRGQTPYPGVENSEIYDYLRQGNRLKQPADCLDGLYALMSRCWELNPQDRPSFTELREDLENTLKALPPAQEPDEILYVNMDEGGGYPEPPGAAGGADPPTQPDPKDSCSCLTAAEVHPAGRYVLCPSTTPSPAQPADRGSPAAPGQEDGA

SEQ ID NO: 167 - DNA, 3999 bp, Homo sapiens
  CDS (461)..(3061)
gagtggagttctggaggaatgtttaccagacacagagcccagagggacagcgcccagagcccagatagagagacacggcctcactggctcagcaccagggtccccttccccctcctcagctccctccctggcccctttaagaaagagctgatcctctcctctcttgagttaacccctgattgtccaggtggcccctggctctggcctggtgggcggaggcaaagggggagccaggggcggagaaagggttgcccaagtctgggagtgagggaaggaggcaggggtgctgagaaggcggctgctgggcagagccggtggcaagggcctcccctgccgctgtgccaggcaggcagtgccaaatccggggagcctggagctggggggagggccggggacagcccggcccgctgccccctcccccgctgggagcccagcaacttctgaggaaagtttggcacccatggcgtggcggtgccccaggatgggcagggtcccgctggcctggtgcttggcgctgtgcggctgggcgtgcatggcccccaggggcacgcaggctgaagaaagtcccttcgtgggcaacccagggaatatcacaggtgcccggggactcacgggcacccttcggtgtcagctccaggttcagggagagccccccgaggtacattggcttcgggatggacagatcctggagctcgcggacagcacccagacccaggtgcccctgggtgaggatgaacaggatgactggatagtggtcagccagctcagaatcacctccctgcagctttccgacacgggacagtaccagtgtttggtgtttctgggacatcagaccttcgtgtcccagcctggctatgttgggctggagggcttgccttacttcctggaggagcccgaagacaggactgtggccgccaacacccccttcaacctgagctgccaagctcagggacccccagagcccgtggacctactctggctccaggatgctgtccccctggccacggctccaggtcacggcccccagcgcagcctgcatgttccagtgctcccccagcagccccgtaacctccacctggtctcccgccaacccacggagctggaggtggcttggactccaggcctgagcggcatctaccccctgacccactgcaccctgcaggctgtgctgtcagacgatgggatgggcatccaggcgggagaaccagaccccccagaggagcccctcacctcgcaagcatccgtgcccccccatcagcttcggctaggcagcctccatcctcaccccccttatcacatccgcgtggcatgcaccagcagccagggcccctcatcctggacccactggcttcctgtggagacgccggagggagtgcccctgggcccccctgagaacattagtgctacgcggaatgggagccaggccttcgtgcattggcaagagccccgggcgcccctgcagggtaccctgttagggtaccggctggcgtatcaaggccaggacaccccagaggtgctaatggacatagggctaaggcaagaggtgaccctggagctgcagggggacgggtctgtgtccaatctgacagtgtgtgtggcagcctacactgctgctggggatggaccctggagcctcccagtacccctggaggcctggcgcccaggggaagcacagccagtccaccagctggtgaaggaaccttcaactcctgccttctcgtggccctggtggtatgtactgctaggagcagtcgtggccgctgcctgtgtcctcatcttggctctcttccttgtccaccggcgaaagaaggagacccgttatggagaagtgtttgaaccaacagtggaaagaggtgaactggtagtcaggtaccgcgtgcgcaagtcctacagtcgtcggaccactgaagctaccttgaacagcctgggcatcagtgaagagctgaaggagaagctgcgggatgtgatggtggaccggcacaaggtggccctggggaagactctgggagagggagagtttggagctgtgatggaaggccagctcaaccaggacgactccatcctcaaggtggctgtgaagacgatgaagattgccatctgcacgaggtcagagctggaggatttcctgagtgaagcggtctgcatgaaggaatttgaccatcccaacgtcatgaggctcatcggtgtctgtttccagggttctgaacgagagagcttcccagcacctgtggtcatcttacctttcatgaaacatggagacctacacagcttcctcctctattcccggctcgggggccagccagtgtacctgcccactcagatgctagtgaagttcatggcagacatcgccagtggcatggagtatctgagtaccaagagattcatacaccgggacctggcggccaggaactgcatgctgaatgagaacatgtccgtgtgtgtggcggacttcgggctctccaagaagatctacaatggggactactaccgccagggacgtatcgccaagatgccagtcaagtggattgccattgagagtctagctgaccgtgtctacaccagcaagagcgatgtgtggtccttcggggtgacaatgtgggagattgccacaagaggccaaaccccatatccgggcgtggagaacagcgagatttatgactatctgcgccagggaaatcgcctgaagcagcctgcggactgtctggatggactgtatgccttgatgtcgcggtgctgggagctaaatccccaggaccggccaagttttacagagctgcgggaagatttggagaacacactgaaggccttgcctcctgcccaggagcctgacgaaatcctctatgtcaacatggatgagggtggaggttatcctgaaccccctggagctgcaggaggagctgaccccccaacccagccagaccctaaggattcctgtagctgcctcactgcggctgaggtccatcctgctggacgctatgtcctctgcccttccacaacccctagccccgctcagcctgctgataggggctccccagcagccccagggcaggaggatggtgcctgagacaaccctccacctggtactccctctcaggatccaagctaagcactgccactgggggaaactccaccttcccactttcccaccccacgccttatccccacttgcagccctgtcttcctacctatcccacctccatcccagacaggtccctggccttctctgtgcagtagcatcaccttgaaagcagtagcatcaccatctgtaaaaggaaggggttggattgcaatatctgaagccctcccaggtgttaacattccaagactctagagtccaaggtttaaagagtctagattcaaaggttctaggtttcaaagatgctgtgagtctttggttctaaggacctgaaattccaaagtctctaattctattaaagtgctaaggttctaaggcctacttttttttttttttttttttttttttttttttttgcgatagagtctcactgtgtcacccaggctggagtgcagtggtgcaatctcgcctcactgcaaccttcacctaccgagttcaagtgattttcctgccttggcctcccaagtagctgggattacaggtgtgtgccaccacacccggctaatttttatatttttagtagagacagggtttcaccatgttggccaggctggtctaaaactcctgacctcaagtgatctgcccacctcagcctcccaaagtgctgagattacaggcatgagccactgcactcaaccttaagacctactgttctaaagctctgacattatgtggttttagattttctggttctaacatttttgataaagcctcaaggttttaggttctaaagttctaagattctgattttaggagctaaggctctatgagtctagatgtttattcttctagagttcagagtccttaaaatgtaagattatagattctaaagattctatagttctagacatggaggttctaag

SEQ ID NO: 168 - protein, 867 aa, Homo sapiens
MAWRCPRMGRVPLAWCLALCGWACMAPRGTQAEESPFVGNPGNITGARGLTGTLRCQLQVQGEPPEVHWLRDGQILELADSTQTQVPLGEDEQDDWIVVSQLRITSLQLSDTGQYQCLVFLGHQTFVSQPGYVGLEGLPYFLEEPEDRTVAANTPFNLSCQAQGPPEPVDLLWLQDAVPLATAPGHGPQRSLHVPVLPQQPRNLHLVSRQPTELEVAWTPGLSGIYPLTHCTLQAVLSDDGMGIQAGEPDPPEEPLTSQASVPPHQLRLGSLHPHPPYHIRVACTSSQGPSSWTHWLPVETPEGVPLGPPENISATRNGSQAFVHWQEPRAPLQGTLLGYRLAYQGQDTPEVLMDIGLRQEVTLELQGDGSVSNLTVCVAAYTAAGDGPWSLPVPLEAWRPGEAQPVHQLVKEPSTPAFSWPWWYVLLGAVVAAACVLILALFLVHRRKKETRYGEVFEPTVERGELVVRYRVRKSYSRRTTEATLNSLGISEELKEKLRDVMVDRHKVALGKTLGEGEFGAVMEGQLNQDDSILKVAVKTMKIAICTRSELEDFLSEAVCMKEFDHPNVMRLIGVCFQGSERESFPAPVVILPFMKHGDLHSFLLYSRLGGQPVYLPTQMLVKFMADIASGMEYLSTKRFIHRDLAARNCMLNENMSVCVADFGLSKKIYNGDYYRQGRIAKMPVKWIAIESLADRVYTSKSDVWSFGVTMWEIATRGQTPYPGVENSEIYDYLRQGNRLKQPADCLDGLYALMSRCWELNPQDRPSFTELREDLENTLKALPPAQEPDEILYVNMDEGGGYPEPPGAAGGADPPTQPDPKDSCSCLTAAEVHPAGRYVLCPSTTPSPAQPADRGSPAAPGQEDGA

SEQ ID NO: 169 - DNA, 1245 bp, Homo sapiens
  CDS (1)..(1245)
aagcttgaagaaagtcccttcgtgggcaacccagggaatatcacaggtgcccggggactcacgggcacccttcggtgtcagctccaggttcagggagagccccccgaggtacattggcttcgggatggacagatcctggagctcgcggacagcacccagacccaggtgcccctgggtgagggtgaacaggatgactggatagtggtcagccagctcagaatcacctccctgcagctttccgacacgggacagtaccagtgtttggtgtttctgggacatcagaccttcgtgtcccagcctggctatgttgggctggagggcttgccttacttcctggaggagcccgaagacaggactgtggccgccaacacccccttcaacctgagctgccaagctcagggacccccagagcccgtggacctactctggctccaggatgctgtccccctggccacggctccaggtcacggcccccagcgcagcctgcatgttccagggctgaacaagacatcctctttctcctgcgaagcccataacgccaagggggtcaccacatcccgcacagccaccatcacagtgctcccccagcagccccgtaacctccacctggtctcccgccaacccacggagctggaggtggcttggactccaggcctgagcggcatctaccccctgacccactgcaccctgcaggctgtgctgtcagacgatgggatgggcatccaggcgggagaactagaccccccagaggagcccctcacctcgcaagcatccgtgcccccccatcagcttcggctaggcagcctccatcctcacaccccttatcacatccgcgcggcatgcaccagcagccagggcccctcatcctggacccactggcttcctgtggagacgccggagggagtgcccctgggcccccctgagaacattagtgctacgcggaatgggagccaggccttcgtgcattggcaagagccccgggcgcccctgcagggtaccctgttagggtaccggctggcgtatcaaggccaggacaccccagaggtgctaatggacatagggctaaggcaagaggtgaccctggagctgcagggggacgggtctgtgtccaatctgacagtgtgtgtggcagcctacactgctgctggggatggaccctggagcctcccagtacccctggaggcctggcgcccagtgaaggaaccttcaactcctgccttctcgtggccctggtggtatctcgag

SEQ ID NO: 170 - protein, 415 aa, Homo sapiens
KLEESPFVGNPGNITGARGLTGTLRCQLQVQGEPPEVHWLRDGQILELADSTQTQVPLGEGEQDDWIVVSQLRITSLQLSDTGQYQCLVFLGHQTFVSQPGYVGLEGLPYFLEEPEDRTVAANTPFNLSCQAQGPPEPVDLLWLQDAVPLATAPGHGPQRSLHVPGLNKTSSFSCEAHNAKGVTTSRTATITVLPQQPRNLHLVSRQPTELEVAWTPGLSGIYPLTHCTLQAVLSDDGMGIQAGELDPPEEPLTSQASVPPHQLRLGSLHPHTPYHIRAACTSSQGPSSWTHWLPVETPEGVPLGPPENISATRNGSQAFVHWQEPRAPLQGTLLGYRLAYQGQDTPEVLMDIGLRQEVTLELQGDGSVSNLTVCVAAYTAAGDGPWSLPVPLEAWRPVKEPSTPAFSWPWWYLE

SEQ ID NO: 171 - DNA, 1191 bp, Homo sapiens
  CDS (1)..(1191)
aagcttgaagaaagtcccttcgtgggcaacccagggaatatcacaggtgcccggggactcacgggcacccttcggtgtcagctccaggttcagggagagccccccgaggtacattggcttcgggatggacagatcctggagctcgcggacagcacccagacccaggtgcccctgggtgaggatgaacaggatgactggatagtggtcagccagctcagaatcacctccctgcagctttccgacacgggacagtaccagtgtttggtgtttctgggacatcagaccttcgtgtcccagcctggctatgttgggctggagggcttgccttacttcctggaggagcccgaagacaggactgtggccgccaacacccccttcaacctgagctgccaagctcagggacccccagagcccgtggacctactctggctccaggatgctgtccccctggccacggctccaggtcacggcccccagcgcagcctgcatgttccagtgctcccccagcagccccgtaacctccacctggtctcccgccaacccacggagctggaggtggcttggactccaggcctgagcggcatctaccccctgacccactgcaccctgcaggctgtgctgtcagacgatgggatgggcatccaggcgggagaaccagaccccccagaggagcccctcacctcgcaagcatccgtgcccccccatcagcttcggctaggcagcctccatcctcacaccccttatcacatccgcgtggcatgcaccagcagccagggcccctcatcctggacccactggcttcctgtggagacgccggagggagtgcccctgggcccccctgagaacattagtgctacgcggaatgggagccaggccttcgtgcattggcaagagccccgggcgcccctgcagggtaccctgttagggtaccggctggcgtatcaaggccaggacaccccagaggtgctaatggacatagggctaaggcaagaggtgaccctggagctgcagggggacgggtctgtgtccaatctgacagtgcgtgtggcagcctacactgctgctggggatggaccctggagcctcccagtacccctggaggcctggcgcccagggcaagcacagccagtccaccagctggtgaaggaaccttcaactcctgccttctcgtggccctggtggtatctcgag

SEQ ID NO: 172 - protein, 397 aa, Homo sapiens
KLEESPFVGNPGNITGARGLTGTLRCQLQVQGEPPEVHWLRDGQILELADSTQTQVPLGEDEQDDWIVVSQLRITSLQLSDTGQYQCLVFLGHQTFVSQPGYVGLEGLPYFLEEPEDRTVAANTPFNLSCQAQGPPEPVDLLWLQDAVPLATAPGHGPQRSLHVPVLPQQPRNLHLVSRQPTELEVAWTPGLSGIYPLTHCTLQAVLSDDGMGIQAGEPDPPEEPLTSQASVPPHQLRLGSLHPHTPYHIRVACTSSQGPSSWTHWLPVETPEGVPLGPPENISATRNGSQAFVHWQEPRAPLQGTLLGYRLAYQGQDTPEVLMDIGLRQEVTLELQGDGSVSNLTVRVAAYTAAGDGPWSLPVPLEAWRPGQAQPVHQLVKEPSTPAFSWPWWYLE

SEQ ID NO: 173 - DNA, 1272 bp, Homo sapiens
  CDS (1)..(1272)
aagcttgaagaaagtcccttcgtgggcaacccagggaatatcacaggtgcccgtgagtccccgggcacccttcggtgtcagctccaggttcagggagagccccccgaggtacattggcttcgggatggacagatcctggagctcgcggacagcacccagacccaggtgcccctgggtgaggatgaacaggatgactggatagtggtcagccagctcagaatcacctccctgcagctttccgacacgggacagtaccagtgtttggtgtttctgggacatcagaccttcgtgtcccagcctggctatgttgggctggagggcttgccttacttcctggaggagcccgaagacaggactgtggccgccaacacccccttcaacctgagctgccaagctcagggacccccagagcccgtggacctactctggctccaggatgctgtccccctggccacggctccaggtcacggcccccagcgcagcctgcatgttccagggctgaacaagacatcctctttctcctgcgaagcccataacgccaagggggtcaccacatcccgcacagccaccatcacagtgctcccccagcagccccgtaacctccacctggtctcccgccaacccacggagctggaggtggcttggactccaggcctgagcggcatctaccccctgacccactgcaccctgcaggctgtgctgtcagacgatgggatgggcatccaggcgggagaaccagaccccccagaggagcccctcacctcgcaagcatccgtgcccccccatcagcttcggctaggcagcctccatcctcacaccccttatcacatccgcgtggcatgcaccagcagccagggcccctcatcctggacccactggcttcctgtggagacgccggagggagtgcccctgggcccccctgagaacattagtgctacgcggaatgggagccaggccttcgtgcattggcaagagccccgggcgcccctgcagggtaccctgttagggtaccggctggcgtatcaaggccaggacaccccagaggtgctaatggacatagggctaaggcaagaggtgaccctggagctgcagggggacgggtctgtgtccaatctgacagtgtgtgtggcagcctacactgctgctggggatggaccctggagcctcccagtacccctggaggcctggcgcccagggcaagcacagccagtccaccagctggtgaaggaaccttcaactcctgccttctcgtggccctggtggtatctcgag

SEQ ID NO: 174 - protein, 424 aa, Homo sapiens
KLEESPFVGNPGNITGARESPGTLRCQLQVQGEPPEVHWLRDGQILELADSTQTQVPLGEDEQDDWIVVSQLRITSLQLSDTGQYQCLVFLGHQTFVSQPGYVGLEGLPYFLEEPEDRTVAANTPFNLSCQAQGPPEPVDLLWLQDAVPLATAPGHGPQRSLHVPGLNKTSSFSCEAHNAKGVTTSRTATITVLPQQPRNLHLVSRQPTELEVAWTPGLSGIYPLTHCTLQAVLSDDGMGIQAGEPDPPEEPLTSQASVPPHQLRLGSLHPHTPYHIRVACTSSQGPSSWTHWLPVETPEGVPLGPPENISATRNGSQAFVHWQEPRAPLQGTLLGYRLAYQGQDTPEVLMDIGLRQEVTLELQGDGSVSNLTVCVAAYTAAGDGPWSLPVPLEAWRPGQAQPVHQLVKEPSTPAFSWPWWYLE

SEQ ID NO: 175 - DNA, 406 bp, Homo sapiens
  CDS (9)..(365)
ggaagatggcggaacaggctaccaagtccgtgctgtttgtgtgtctgggtaacatttgtcgatcacccattgcagaagcagttttcaggaaacttgtaaccgatcaaaacatctcagagaatattaccaaagaagattttgccacatttgattatatactatgtatggatgaaagcaatctgagagatttgaatagaaaaagtaatcaagttaaaacctgcaaagctaaaattgaactacttgggagctatgatccacaaaaacaacttattattgaagatccctattatgggaatgactctgactttgagacggtgtaccagcagtgtgtcaggtgctgcagagcgttcttggagaaggcccactgaggcaggttcgtgccctgctgcggccagcctgactagac

SEQ ID NO: 176 - protein, 119 aa, Homo sapiens
AEQATKSVLFVCLGNICRSPIAEAVFRKLVTDQNISENITKEDFATFDYILCMDESNLRDLNRKSNQVKTCKAKIELLGSYDPQKQLIIEDPYYGNDSDFETVYQQCVRCCRAFLEKAH

SEQ ID NO: 177 - DNA, 19 bp, Artificial Sequence
  Description of Artifical Sequence:  Primer/Probe
ttgcacttcttgacatagg

SEQ ID NO: 178 - DNA, 27 bp, Artificial Sequence
  Description of Artifical Sequence:  Primer/Probe
tacctctgcaaggtctgctcgttacta

SEQ ID NO: 179 - DNA, 20 bp, Artificial Sequence
  Description of Artifical Sequence:  Primer/Probe
gtcacttcattgggtatcag

SEQ ID NO: 180 - DNA, 22 bp, Artificial Sequence
  Description of Artifical Sequence:  Primer/Probe
gaaaagagaatttggggtgttc

SEQ ID NO: 181 - DNA, 26 bp, Artificial Sequence
  Description of Artifical Sequence:  Primer/Probe
tccagtcaaagtggcacagcaaatca

SEQ ID NO: 182 - DNA, 22 bp, Artificial Sequence
  Description of Artifical Sequence:  Primer/Probe
catctaacggtgttgtccattt

SEQ ID NO: 183 - DNA, 22 bp, Artificial Sequence
  Description of Artifical Sequence:  Primer/Probe
atcctaacccctttgtcacatt

SEQ ID NO: 184 - DNA, 27 bp, Artificial Sequence
  Description of Artifical Sequence:  Primer/Probe
ttgcttgatggttttattcctttccac

SEQ ID NO: 185 - DNA, 22 bp, Artificial Sequence
  Description of Artifical Sequence:  Primer/Probe
ggcataacaaagaagcaattca

SEQ ID NO: 186 - DNA, 21 bp, Artificial Sequence
  Description of Artifical Sequence:  Primer/Probe
gccaaggagaacaacgtagat

SEQ ID NO: 187 - DNA, 26 bp, Artificial Sequence
  Description of Artifical Sequence:  Primer/Probe
taccctggctacgggttcctttctga

SEQ ID NO: 188 - DNA, 22 bp, Artificial Sequence
  Description of Artifical Sequence:  Primer/Probe
ctgccaccactttgatgtctat

SEQ ID NO: 189 - DNA, 22 bp, Artificial Sequence
  Description of Artifical Sequence:  Primer/Probe
accaagaaggtcttgagcaact

SEQ ID NO: 190 - DNA, 26 bp, Artificial Sequence
  Description of Artifical Sequence:  Primer/Probe
tcttctccatgctgttcctcatgttc

SEQ ID NO: 191 - DNA, 22 bp, Artificial Sequence
  Description of Artifical Sequence:  Primer/Probe
caggggaaatgtcagaacagta

SEQ ID NO: 192 - DNA, 24 bp, Artificial Sequence
  Description of Artifical Sequence:  Primer/Probe
agaagaaagagagtgaggcagttt

SEQ ID NO: 193 - DNA, 29 bp, Artificial Sequence
  Description of Artifical Sequence:  Primer/Probe
tcatctacatcttcatgctgttcctggtc

SEQ ID NO: 194 - DNA, 21 bp, Artificial Sequence
  Description of Artifical Sequence:  Primer/Probe
ccatctccaggaagagaagag

SEQ ID NO: 195 - DNA, 20 bp, Artificial Sequence
  Description of Artifical Sequence:  Primer/Probe
gttctggtccagcaaaactg

SEQ ID NO: 196 - DNA, 26 bp, Artificial Sequence
  Description of Artifical Sequence:  Primer/Probe
tcagcgaaactgcctgagccagaata

SEQ ID NO: 197 - DNA, 24 bp, Artificial Sequence
  Description of Artifical Sequence:  Primer/Probe
caggaacagcatgaagatgtagat

SEQ ID NO: 198 - DNA, 22 bp, Artificial Sequence
  Description of Artifical Sequence:  Primer/Probe
tgtcacgtaacgtgactgaaaa

SEQ ID NO: 199 - DNA, 30 bp, Artificial Sequence
  Description of Artifical Sequence:  Primer/Probe
ttgcagacctcactattttattttcaactc

SEQ ID NO: 200 - DNA, 22 bp, Artificial Sequence
  Description of Artifical Sequence:  Primer/Probe
gaattggcacagcatagacagt

SEQ ID NO: 201 - DNA, 19 bp, Artificial Sequence
  Description of Artifical Sequence:  Primer/Probe
cccaagttcaaggcaagac

SEQ ID NO: 202 - DNA, 26 bp, Artificial Sequence
  Description of Artifical Sequence:  Primer/Probe
ttctccttcgctgactacaacctgct

SEQ ID NO: 203 - DNA, 20 bp, Artificial Sequence
  Description of Artifical Sequence:  Primer/Probe
ctcatggatcagcagcaagt

SEQ ID NO: 204 - DNA, 21 bp, Artificial Sequence
  Description of Artifical Sequence:  Primer/Probe
tccatcctctggacttcactt

SEQ ID NO: 205 - DNA, 26 bp, Artificial Sequence
  Description of Artifical Sequence:  Primer/Probe
ttttcccacagagatcatcgcattca

SEQ ID NO: 206 - DNA, 19 bp, Artificial Sequence
  Description of Artifical Sequence:  Primer/Probe
ccagcactttgcaactttg

SEQ ID NO: 207 - DNA, 22 bp, Artificial Sequence
  Description of Artifical Sequence:  Primer/Probe
caagagcttctctcaggagaga

SEQ ID NO: 208 - DNA, 28 bp, Artificial Sequence
  Description of Artifical Sequence:  Primer/Probe
ttcaaagagaacttccaggtatcctttc

SEQ ID NO: 209 - DNA, 22 bp, Artificial Sequence
  Description of Artifical Sequence:  Primer/Probe
tttcatgtcctctggagtcaac

SEQ ID NO: 210 - DNA, 22 bp, Artificial Sequence
  Description of Artifical Sequence:  Primer/Probe
gctggtgctgatctgtttatct

SEQ ID NO: 211 - DNA, 23 bp, Artificial Sequence
  Description of Artifical Sequence:  Primer/Probe
tcagcccctgaagtatgccaacc

SEQ ID NO: 212 - DNA, 22 bp, Artificial Sequence
  Description of Artifical Sequence:  Primer/Probe
ggcaccagtatcgatgtacatc

SEQ ID NO: 213 - DNA, 18 bp, Artificial Sequence
  Description of Artifical Sequence:  Primer/Probe
catttctggcggcagtgt

SEQ ID NO: 214 - DNA, 22 bp, Artificial Sequence
  Description of Artifical Sequence:  Primer/Probe
tctctgccagctggccttctgc

SEQ ID NO: 215 - DNA, 22 bp, Artificial Sequence
  Description of Artifical Sequence:  Primer/Probe
gcattgctctctcactgttgtt

SEQ ID NO: 216 - DNA, 22 bp, Artificial Sequence
  Description of Artifical Sequence:  Primer/Probe
gaccaaattccattcaaatgaa

SEQ ID NO: 217 - DNA, 28 bp, Artificial Sequence
  Description of Artifical Sequence:  Primer/Probe
tcaggcctacattgatctacctcttggg

SEQ ID NO: 218 - DNA, 22 bp, Artificial Sequence
  Description of Artifical Sequence:  Primer/Probe
ttctgcaggattctctctctga

SEQ ID NO: 219 - DNA, 21 bp, Artificial Sequence
  Description of Artifical Sequence:  Primer/Probe
acttacatggtgcagctgcta

SEQ ID NO: 220 - DNA, 23 bp, Artificial Sequence
  Description of Artifical Sequence:  Primer/Probe
tcaaggcctggactacctccacg

SEQ ID NO: 221 - DNA, 22 bp, Artificial Sequence
  Description of Artifical Sequence:  Primer/Probe
ttgtctggcttgatgtctaggt

SEQ ID NO: 222 - DNA, 21 bp, Artificial Sequence
  Description of Artifical Sequence:  Primer/Probe
cttccagctgtaccccaatac

SEQ ID NO: 223 - DNA, 24 bp, Artificial Sequence
  Description of Artifical Sequence:  Primer/Probe
tatcccagagcgccaccctcttct

SEQ ID NO: 224 - DNA, 22 bp, Artificial Sequence
  Description of Artifical Sequence:  Primer/Probe
ctccagggatgtacagagagaa

SEQ ID NO: 225 - DNA, 22 bp, Artificial Sequence
  Description of Artifical Sequence:  Primer/Probe
gcggaagaagaagccatataat

SEQ ID NO: 226 - DNA, 26 bp, Artificial Sequence
  Description of Artifical Sequence:  Primer/Probe
ttacaccaagaggaatgctcttcgcg

SEQ ID NO: 227 - DNA, 22 bp, Artificial Sequence
  Description of Artifical Sequence:  Primer/Probe
gagacttgtaatcgtccatcca

SEQ ID NO: 228 - DNA, 21 bp, Artificial Sequence
  Description of Artifical Sequence:  Primer/Probe
gaccacctggagaatgtcatc

SEQ ID NO: 229 - DNA, 25 bp, Artificial Sequence
  Description of Artifical Sequence:  Primer/Probe
taagcagcacattcaagaggctcct

SEQ ID NO: 230 - DNA, 22 bp, Artificial Sequence
  Description of Artifical Sequence:  Primer/Probe
gtgcaaacagagaggagtctgt

SEQ ID NO: 231 - DNA, 22 bp, Artificial Sequence
  Description of Artifical Sequence:  Primer/Probe
tcacaatctgtcttttggtgaa

SEQ ID NO: 232 - DNA, 26 bp, Artificial Sequence
  Description of Artifical Sequence:  Primer/Probe
tcaaagcctttcaactgatgcattct

SEQ ID NO: 233 - DNA, 22 bp, Artificial Sequence
  Description of Artifical Sequence:  Primer/Probe
acaacagttcgaatgctctttc

SEQ ID NO: 234 - DNA, 22 bp, Artificial Sequence
  Description of Artifical Sequence:  Primer/Probe
ttttctcagggaggagctttat

SEQ ID NO: 235 - DNA, 24 bp, Artificial Sequence
  Description of Artifical Sequence:  Primer/Probe
taccacgcaccagaaactggcagg

SEQ ID NO: 236 - DNA, 20 bp, Artificial Sequence
  Description of Artifical Sequence:  Primer/Probe
taggaccctgtggaaaggaa

SEQ ID NO: 237 - DNA, 22 bp, Artificial Sequence
  Description of Artifical Sequence:  Primer/Probe
ccctctccttttcactctctct

SEQ ID NO: 238 - DNA, 26 bp, Artificial Sequence
  Description of Artifical Sequence:  Primer/Probe
tcattccttccctttcttctttcaac

SEQ ID NO: 239 - DNA, 22 bp, Artificial Sequence
  Description of Artifical Sequence:  Primer/Probe
ccctggttattagccttggtta

SEQ ID NO: 240 - DNA, 22 bp, Artificial Sequence
  Description of Artifical Sequence:  Primer/Probe
ccctctccttttcactctctct

SEQ ID NO: 241 - DNA, 26 bp, Artificial Sequence
  Description of Artifical Sequence:  Primer/Probe
tcattccttccctttcttctttcaac

SEQ ID NO: 242 - DNA, 22 bp, Artificial Sequence
  Description of Artifical Sequence:  Primer/Probe
ccctggttattagccttggtta

SEQ ID NO: 243 - DNA, 22 bp, Artificial Sequence
  Description of Artifical Sequence:  Primer/Probe
tggaaaccacagagaacagttc

SEQ ID NO: 244 - DNA, 26 bp, Artificial Sequence
  Description of Artifical Sequence:  Primer/Probe
tccctgagtgcacagtccatttagag

SEQ ID NO: 245 - DNA, 21 bp, Artificial Sequence
  Description of Artifical Sequence:  Primer/Probe
ctggcactcaattttgtagca

SEQ ID NO: 246 - DNA, 20 bp, Artificial Sequence
  Description of Artifical Sequence:  Primer/Probe
gggcgtagaagacactttgg

SEQ ID NO: 247 - DNA, 26 bp, Artificial Sequence
  Description of Artifical Sequence:  Primer/Probe
ttggtcaacaggacagcttcttgcag

SEQ ID NO: 248 - DNA, 23 bp, Artificial Sequence
  Description of Artifical Sequence:  Primer/Probe
ctgtggtttccagatagttgttg

SEQ ID NO: 249 - DNA, 23 bp, Artificial Sequence
  Description of Artifical Sequence:  Primer/Probe
caatctgtgttttcttccacagt

SEQ ID NO: 250 - DNA, 30 bp, Artificial Sequence
  Description of Artifical Sequence:  Primer/Probe
ttcctccagctattagtaatagtgcatctg

SEQ ID NO: 251 - DNA, 28 bp, Artificial Sequence
  Description of Artifical Sequence:  Primer/Probe
acttcttctctaagctgatcttcaaaat

SEQ ID NO: 252 - DNA, 22 bp, Artificial Sequence
  Description of Artifical Sequence:  Primer/Probe
ccatgtccagaagtcaaaagtt

SEQ ID NO: 253 - DNA, 30 bp, Artificial Sequence
  Description of Artifical Sequence:  Primer/Probe
ttcatctggctttctgatctcttactaatg

SEQ ID NO: 254 - DNA, 22 bp, Artificial Sequence
  Description of Artifical Sequence:  Primer/Probe
taggtggtcaaacaaagctttc

SEQ ID NO: 255 - DNA, 22 bp, Artificial Sequence
  Description of Artifical Sequence:  Primer/Probe
ggactgccatatcacaaaagat

SEQ ID NO: 256 - DNA, 29 bp, Artificial Sequence
  Description of Artifical Sequence:  Primer/Probe
tttctcatcatgtgacactacaacttgtt

SEQ ID NO: 257 - DNA, 20 bp, Artificial Sequence
  Description of Artifical Sequence:  Primer/Probe
attgaccccagttgctctct

SEQ ID NO: 258 - DNA, 22 bp, Artificial Sequence
  Description of Artifical Sequence:  Primer/Probe
tcaacctgaccaaccattctta

SEQ ID NO: 259 - DNA, 26 bp, Artificial Sequence
  Description of Artifical Sequence:  Primer/Probe
taggccaggcttccccaaatataaat

SEQ ID NO: 260 - DNA, 22 bp, Artificial Sequence
  Description of Artifical Sequence:  Primer/Probe
gcttctatggtgacttcatggt

SEQ ID NO: 261 - DNA, 20 bp, Artificial Sequence
  Description of Artifical Sequence:  Primer/Probe
gactttcccagtggctgtct

SEQ ID NO: 262 - DNA, 26 bp, Artificial Sequence
  Description of Artifical Sequence:  Primer/Probe
tagccttcttccctctgcagactcat

SEQ ID NO: 263 - DNA, 20 bp, Artificial Sequence
  Description of Artifical Sequence:  Primer/Probe
gagtcacatggctgatccat

SEQ ID NO: 264 - DNA, 22 bp, Artificial Sequence
  Description of Artifical Sequence:  Primer/Probe
gattctgtgatcgtggacactt

SEQ ID NO: 265 - DNA, 24 bp, Artificial Sequence
  Description of Artifical Sequence:  Primer/Probe
tcctcttcaagtccacgctggtgt

SEQ ID NO: 266 - DNA, 22 bp, Artificial Sequence
  Description of Artifical Sequence:  Primer/Probe
tcacagatacattgccacaatc

SEQ ID NO: 267 - DNA, 20 bp, Artificial Sequence
  Description of Artifical Sequence:  Primer/Probe
aagctgcacccagatgatgt

SEQ ID NO: 268 - DNA, 24 bp, Artificial Sequence
  Description of Artifical Sequence:  Primer/Probe
tccccgtgggaagacctatgcttt

SEQ ID NO: 269 - DNA, 21 bp, Artificial Sequence
  Description of Artifical Sequence:  Primer/Probe
agtccacacatagtccccctt

SEQ ID NO: 270 - DNA, 23 bp, Artificial Sequence
  Description of Artifical Sequence:  Primer/Probe
actttaagctgcacccagatgat

SEQ ID NO: 271 - DNA, 25 bp, Artificial Sequence
  Description of Artifical Sequence:  Primer/Probe
tctctctatgggccccgtgggaaga

SEQ ID NO: 272 - DNA, 22 bp, Artificial Sequence
  Description of Artifical Sequence:  Primer/Probe
acatagtcccccttgaaagcat

SEQ ID NO: 273 - DNA, 22 bp, Artificial Sequence
  Description of Artifical Sequence:  Primer/Probe
agagcatgaaggatgctacctc

SEQ ID NO: 274 - DNA, 22 bp, Artificial Sequence
  Description of Artifical Sequence:  Primer/Probe
tcagcccttagaagactgcagt

SEQ ID NO: 275 - DNA, 22 bp, Artificial Sequence
  Description of Artifical Sequence:  Primer/Probe
gtagccgatcaagtggacattc

SEQ ID NO: 276 - DNA, 20 bp, Artificial Sequence
  Description of Artifical Sequence:  Primer/Probe
tccgctggaacataatgaga

SEQ ID NO: 277 - DNA, 26 bp, Artificial Sequence
  Description of Artifical Sequence:  Primer/Probe
tcataaccagcgtgacagacagcaca

SEQ ID NO: 278 - DNA, 22 bp, Artificial Sequence
  Description of Artifical Sequence:  Primer/Probe
agttctttccctctcgagatga

SEQ ID NO: 279 - DNA, 22 bp, Artificial Sequence
  Description of Artifical Sequence:  Primer/Probe
cagcatatccaagttttgcaat

SEQ ID NO: 280 - DNA, 28 bp, Artificial Sequence
  Description of Artifical Sequence:  Primer/Probe
tccagccaggagaatatatattccatgc

SEQ ID NO: 281 - DNA, 22 bp, Artificial Sequence
  Description of Artifical Sequence:  Primer/Probe
taaattgggcatcatcattttc

SEQ ID NO: 282 - DNA, 22 bp, Artificial Sequence
  Description of Artifical Sequence:  Primer/Probe
aggaatggaatttctggaattt

SEQ ID NO: 283 - DNA, 25 bp, Artificial Sequence
  Description of Artifical Sequence:  Primer/Probe
taagtcggcccgtctgcctgtaaaa

SEQ ID NO: 284 - DNA, 22 bp, Artificial Sequence
  Description of Artifical Sequence:  Primer/Probe
atggtgtagatgccttcaaaca

SEQ ID NO: 285 - DNA, 21 bp, Artificial Sequence
  Description of Artifical Sequence:  Primer/Probe
tggaagaagaggaggacttga

SEQ ID NO: 286 - DNA, 26 bp, Artificial Sequence
  Description of Artifical Sequence:  Primer/Probe
tcatttgaagatcttctttgctttgc

SEQ ID NO: 287 - DNA, 20 bp, Artificial Sequence
  Description of Artifical Sequence:  Primer/Probe
attccattcctttggcaact

SEQ ID NO: 288 - DNA, 23 bp, Artificial Sequence
  Description of Artifical Sequence:  Primer/Probe
acaaggacaagggtaacacaaag

SEQ ID NO: 289 - DNA, 26 bp, Artificial Sequence
  Description of Artifical Sequence:  Primer/Probe
ttcagaacttctgcagtgtcccagga

SEQ ID NO: 290 - DNA, 26 bp, Artificial Sequence
  Description of Artifical Sequence:  Primer/Probe
taatcttatgttgatttcaccatgtg

SEQ ID NO: 291 - DNA, 22 bp, Artificial Sequence
  Description of Artifical Sequence:  Primer/Probe
tgttcatgtgaagtgtgtggat

SEQ ID NO: 292 - DNA, 26 bp, Artificial Sequence
  Description of Artifical Sequence:  Primer/Probe
taacttgtgtaaacaaagctccaacc

SEQ ID NO: 293 - DNA, 21 bp, Artificial Sequence
  Description of Artifical Sequence:  Primer/Probe
gttcaggaggaactggacaag

SEQ ID NO: 294 - DNA, 22 bp, Artificial Sequence
  Description of Artifical Sequence:  Primer/Probe
agatcagttggtcagagagcaa

SEQ ID NO: 295 - DNA, 26 bp, Artificial Sequence
  Description of Artifical Sequence:  Primer/Probe
tctcctggctgacctcaccttctgga

SEQ ID NO: 296 - DNA, 21 bp, Artificial Sequence
  Description of Artifical Sequence:  Primer/Probe
gagaacctggggttctctttc

SEQ ID NO: 297 - DNA, 25 bp, Artificial Sequence
  Description of Artifical Sequence:  Primer/Probe
ggcagatgttaccctcatatatcat

SEQ ID NO: 298 - DNA, 26 bp, Artificial Sequence
  Description of Artifical Sequence:  Primer/Probe
taacgcctacgtcactgacgaagaca

SEQ ID NO: 299 - DNA, 26 bp, Artificial Sequence
  Description of Artifical Sequence:  Primer/Probe
aaaatatccatcttacatccacaaga

SEQ ID NO: 300 - DNA, 19 bp, Artificial Sequence
  Description of Artifical Sequence:  Primer/Probe
aaaggctcacggtttggat

SEQ ID NO: 301 - DNA, 29 bp, Artificial Sequence
  Description of Artifical Sequence:  Primer/Probe
tagcaacatggcatatcacttcttcaggc

SEQ ID NO: 302 - DNA, 22 bp, Artificial Sequence
  Description of Artifical Sequence:  Primer/Probe
caggatctcttccagtgtgaaa

SEQ ID NO: 303 - DNA, 22 bp, Artificial Sequence
  Description of Artifical Sequence:  Primer/Probe
caatctcaagactccagttgct

SEQ ID NO: 304 - DNA, 26 bp, Artificial Sequence
  Description of Artifical Sequence:  Primer/Probe
tcagaatggaattcagccaccaatca

SEQ ID NO: 305 - DNA, 22 bp, Artificial Sequence
  Description of Artifical Sequence:  Primer/Probe
gaggcgagaaagaattctcttt

SEQ ID NO: 306 - DNA, 22 bp, Artificial Sequence
  Description of Artifical Sequence:  Primer/Probe
gttcatggcttgaaagaagaaa

SEQ ID NO: 307 - DNA, 28 bp, Artificial Sequence
  Description of Artifical Sequence:  Primer/Probe
tttaataattcatggaactgctgacaca

SEQ ID NO: 308 - DNA, 22 bp, Artificial Sequence
  Description of Artifical Sequence:  Primer/Probe
gctgagtgttggaaatgaactt

SEQ ID NO: 309 - DNA, 21 bp, Artificial Sequence
  Description of Artifical Sequence:  Primer/Probe
aaaaccatgtgccttgttttg

SEQ ID NO: 310 - DNA, 26 bp, Artificial Sequence
  Description of Artifical Sequence:  Primer/Probe
tctctcctgttggaaaagaacagcct

SEQ ID NO: 311 - DNA, 22 bp, Artificial Sequence
  Description of Artifical Sequence:  Primer/Probe
atccctgatagccacaagaagt

SEQ ID NO: 312 - DNA, 22 bp, Artificial Sequence
  Description of Artifical Sequence:  Primer/Probe
tggggattatgatcaagaacag

SEQ ID NO: 313 - DNA, 26 bp, Artificial Sequence
  Description of Artifical Sequence:  Primer/Probe
ttgctgataaccaaataccactgttg

SEQ ID NO: 314 - DNA, 22 bp, Artificial Sequence
  Description of Artifical Sequence:  Primer/Probe
tttcatgaatctggtccagttt

SEQ ID NO: 315 - DNA, 22 bp, Artificial Sequence
  Description of Artifical Sequence:  Primer/Probe
tcagccagaccatagagaatgt

SEQ ID NO: 316 - DNA, 25 bp, Artificial Sequence
  Description of Artifical Sequence:  Primer/Probe
tatgctgaagcaccccaacatcatt

SEQ ID NO: 317 - DNA, 22 bp, Artificial Sequence
  Description of Artifical Sequence:  Primer/Probe
ctccttcagacatacccctctt

SEQ ID NO: 318 - DNA, 22 bp, Artificial Sequence
  Description of Artifical Sequence:  Primer/Probe
catagagaatgttcgccaagag

SEQ ID NO: 319 - DNA, 25 bp, Artificial Sequence
  Description of Artifical Sequence:  Primer/Probe
tatgctgaagcaccccaacatcatt

SEQ ID NO: 320 - DNA, 22 bp, Artificial Sequence
  Description of Artifical Sequence:  Primer/Probe
ctccttcagacatacccctctt

SEQ ID NO: 321 - DNA, 21 bp, Artificial Sequence
  Description of Artifical Sequence:  Primer/Probe
tacctcgtctgctttctcaca

SEQ ID NO: 322 - DNA, 26 bp, Artificial Sequence
  Description of Artifical Sequence:  Primer/Probe
tccagttgttgctcttctcccaagat

SEQ ID NO: 323 - DNA, 21 bp, Artificial Sequence
  Description of Artifical Sequence:  Primer/Probe
cacaagttccttgcagagaca

SEQ ID NO: 324 - DNA, 22 bp, Artificial Sequence
  Description of Artifical Sequence:  Primer/Probe
attccagggtttatgtgtcatg

SEQ ID NO: 325 - DNA, 26 bp, Artificial Sequence
  Description of Artifical Sequence:  Primer/Probe
ttggtgacttcacacaccataatggc

SEQ ID NO: 326 - DNA, 22 bp, Artificial Sequence
  Description of Artifical Sequence:  Primer/Probe
ctttctccccgtagattgactt

SEQ ID NO: 327 - DNA, 18 bp, Artificial Sequence
  Description of Artifical Sequence:  Primer/Probe
gcaagaatatggcgacca

SEQ ID NO: 328 - DNA, 23 bp, Artificial Sequence
  Description of Artifical Sequence:  Primer/Probe
tcagatccgtgacatcacgctgc

SEQ ID NO: 329 - DNA, 21 bp, Artificial Sequence
  Description of Artifical Sequence:  Primer/Probe
gtcactgaccatatctgggat

SEQ ID NO: 330 - DNA, 22 bp, Artificial Sequence
  Description of Artifical Sequence:  Primer/Probe
aaactggacctgtcatctgttg

SEQ ID NO: 331 - DNA, 26 bp, Artificial Sequence
  Description of Artifical Sequence:  Primer/Probe
taagcagcttccaagccctcaaagtt

SEQ ID NO: 332 - DNA, 22 bp, Artificial Sequence
  Description of Artifical Sequence:  Primer/Probe
aaggcaacttcttacccttcac

SEQ ID NO: 333 - DNA, 22 bp, Artificial Sequence
  Description of Artifical Sequence:  Primer/Probe
ggaggaggttttgtagattgga

SEQ ID NO: 334 - DNA, 26 bp, Artificial Sequence
  Description of Artifical Sequence:  Primer/Probe
tcgtttaaacacaattcaatccgaca

SEQ ID NO: 335 - DNA, 22 bp, Artificial Sequence
  Description of Artifical Sequence:  Primer/Probe
ttctggtaaatcactggaacca

SEQ ID NO: 336 - DNA, 20 bp, Artificial Sequence
  Description of Artifical Sequence:  Primer/Probe
tgaatgacttcgaggtgctc

SEQ ID NO: 337 - DNA, 26 bp, Artificial Sequence
  Description of Artifical Sequence:  Primer/Probe
tcacagagctacagcggctgctacaa

SEQ ID NO: 338 - DNA, 20 bp, Artificial Sequence
  Description of Artifical Sequence:  Primer/Probe
ctcttcagcatctgccacat

SEQ ID NO: 339 - DNA, 20 bp, Artificial Sequence
  Description of Artifical Sequence:  Primer/Probe
ggaccccattcgactactgt

SEQ ID NO: 340 - DNA, 23 bp, Artificial Sequence
  Description of Artifical Sequence:  Primer/Probe
tctgatgaccagccgccatcaat

SEQ ID NO: 341 - DNA, 20 bp, Artificial Sequence
  Description of Artifical Sequence:  Primer/Probe
ttctcaaactgcacctggtc

SEQ ID NO: 342 - DNA, 20 bp, Artificial Sequence
  Description of Artifical Sequence:  Primer/Probe
tctggacgacaactattgcc

SEQ ID NO: 343 - DNA, 25 bp, Artificial Sequence
  Description of Artifical Sequence:  Primer/Probe
tatggtgctacactacggatccgca

SEQ ID NO: 344 - DNA, 20 bp, Artificial Sequence
  Description of Artifical Sequence:  Primer/Probe
gtcacagaattctcgctcga

SEQ ID NO: 345 - DNA, 20 bp, Artificial Sequence
  Description of Artifical Sequence:  Primer/Probe
accaagtgtgagggtgacta

SEQ ID NO: 346 - DNA, 27 bp, Artificial Sequence
  Description of Artifical Sequence:  Primer/Probe
ttcctggaaggaattataatccccaac

SEQ ID NO: 347 - DNA, 20 bp, Artificial Sequence
  Description of Artifical Sequence:  Primer/Probe
ccagtccacaaacacagaga

SEQ ID NO: 348 - DNA, 26 bp, Artificial Sequence
  Description of Artifical Sequence:  Primer/Probe
caaataaataacatcttcagcgttct

SEQ ID NO: 349 - DNA, 29 bp, Artificial Sequence
  Description of Artifical Sequence:  Primer/Probe
tcggtcgttttattttcacacactttgtc

SEQ ID NO: 350 - DNA, 28 bp, Artificial Sequence
  Description of Artifical Sequence:  Primer/Probe
ctctcagttgtattcttcagagaaacta

SEQ ID NO: 351 - DNA, 22 bp, Artificial Sequence
  Description of Artifical Sequence:  Primer/Probe
acacagcttcctcctctattcc

SEQ ID NO: 352 - DNA, 26 bp, Artificial Sequence
  Description of Artifical Sequence:  Primer/Probe
tccagtgtacctgcccactcagatgc

SEQ ID NO: 353 - DNA, 22 bp, Artificial Sequence
  Description of Artifical Sequence:  Primer/Probe
gatgtctgccatgaacttcact

SEQ ID NO: 354 - DNA, 19 bp, Artificial Sequence
  Description of Artifical Sequence:  Primer/Probe
cacgagaaggcaggagttg

SEQ ID NO: 355 - DNA, 23 bp, Artificial Sequence
  Description of Artifical Sequence:  Primer/Probe
taccagctggtgggagaccaggt

SEQ ID NO: 356 - DNA, 17 bp, Artificial Sequence
  Description of Artifical Sequence:  Primer/Probe
gcacagccaccatcaca

SEQ ID NO: 357 - DNA, 22 bp, Artificial Sequence
  Description of Artifical Sequence:  Primer/Probe
acacagcttcctcctctattcc

SEQ ID NO: 358 - DNA, 26 bp, Artificial Sequence
  Description of Artifical Sequence:  Primer/Probe
tccagtgtacctgcccactcagatgc

SEQ ID NO: 359 - DNA, 22 bp, Artificial Sequence
  Description of Artifical Sequence:  Primer/Probe
gatgtctgccatgaacttcact

SEQ ID NO: 360 - DNA, 18 bp, Artificial Sequence
  Description of Artifical Sequence:  Primer/Probe
gcagcctgcatgttccag

SEQ ID NO: 361 - DNA, 25 bp, Artificial Sequence
  Description of Artifical Sequence:  Primer/Probe
tagcagccccgtaacctccacctgg

SEQ ID NO: 362 - DNA, 17 bp, Artificial Sequence
  Description of Artifical Sequence:  Primer/Probe
ccacctccagctccgtg

SEQ ID NO: 363 - DNA, 23 bp, Artificial Sequence
  Description of Artifical Sequence:  Primer/Probe
ttgtgtgtctgggtaacatttgt

SEQ ID NO: 364 - DNA, 26 bp, Artificial Sequence
  Description of Artifical Sequence:  Primer/Probe
tatcacccattgcagaagcagttttc

SEQ ID NO: 365 - DNA, 29 bp, Artificial Sequence
  Description of Artifical Sequence:  Primer/Probe
cttctttggtaatattctctgagatgttt

SEQ ID NO: 366 - DNA, 22 bp, Artificial Sequence
  Description of Artifical Sequence:  Primer/Probe
tgtcacgtaacgtgactgaaaa

SEQ ID NO: 367 - DNA, 30 bp, Artificial Sequence; identical to SEQ ID NO: 199
  Description of Artifical Sequence:  Primer/Probe

SEQ ID NO: 368 - DNA, 22 bp, Artificial Sequence
  Description of Artifical Sequence:  Primer/Probe
gaattggcacagcatagacagt

SEQ ID NO: 369 - protein, 504 aa, Rattus norvegicus
MKKTEMGRFNISPDEDSSSYSSNGDFNYSYPTKQAALKSHYVDVDPENQNFLLESNLGKKKYETDFHPSTTSFGMSVFNLTNAIVGNGILGLSYAMANTGIALFIILLTFVSIFSLYSVHLLLKTANEGGSLLYEQLGHKAYGLAGKLAASGSITMQNIGAMSSYLFIVKYELPLVIKALMNIEDTNGLWYLNGDYLVLLVSFVLILPLSLLRNLGYLGYTSGLSLLCMIFFLIVVICKKFQIPCPVEVALMANETVNGTFTQVALAALASNSTAADTCRPRYFIFNSQTVYAVPILTFSFVCHPAVLPIYEELKSRSRRRMMNVSKISFFAMFLMYLLAALFGYLTFYEHVESELLHTYSAIVGTDILLLVVRLAVLVAVTLTVPVVIFPIRSSVTHLLCPTKEFSWFRHSVITVTILAFTNLLVIFVPTIRDIFGFIGASAAAMLIFILPSAFYIKLVKKEPMRSVQKIGALCFLLSGVVVMIGSMGLIVLDWVHDASAGGH

What is claimed is:

1. An isolated polypeptide comprising the mature form of an amino acid sequenced selected from the group consisting of SEQ ID NO: 2n, wherein n is an integer between 1 and 88.

2. An isolated polypeptide comprising an amino acid sequence selected from the group consisting of SEQ ID NO: 2n, wherein n is an integer between 1 and 88.

3. An isolated polypeptide comprising an amino acid sequence which is at least 95% identical to an amino acid sequence selected from the group consisting of SEQ ID NO: 2n, wherein n is an integer between 1 and 88.

4. An isolated polypeptide, wherein the polypeptide comprises an amino acid sequence comprising one or more conservative substitutions in the amino acid sequence selected from the group consisting of SEQ ID NO: 2n, wherein n is an Integer between 1 and 88.

5. The polypeptide of claim 1 wherein said polypeptide is naturally occurring.

6. A composition comprising the polypeptide of claim 1 and a carrier.

7. A kit comprising, in one or more containers, the composition of claim 6.

8. The use of a therapeutic in the manufacture of a medicament for treating a syndrome associated with a human disease, the disease selected from a pathology associated with the polypeptide of claim 1, wherein the therapeutic comprises the polypeptide of claim 1.

9. A method for determining the presence or amount of the polypeptide of claim 1 in a sample, the method comprising:
(a) providing said sample;
(b) introducing said sample to an antibody that binds immunospecifically to the polypeptide; and
(c) determining the presence or amount of antibody bound to said polypeptide, thereby determining the presence or amount of polypeptide in said sample.

10. A method for determining the presence of or predisposition to a disease associated with altered levels of expression of the polypeptide of claim 1 in a first mammalian subject, the method comprising:
a) measuring the level of expression of the polypeptide in a sample from the first mammalian subject; and
b) comparing the expression of said polypeptide in the sample of step (a) to the expression of the polypeptide present in a control sample from a second mammalian subject known not to have, or not to be predisposed to, said disease,
wherein an alteration in the level of expression of the polypeptide in the first subject as compared to the control sample indicates the presence of or predisposition to said disease.

11. A method of identifying an agent that binds to the polypeptide of claim 1, the method comprising:
(a) introducing, said polypeptide to said agent; and
(b) determining, whether said agent binds to said polypeptide.

12. The method of claim 11 wherein the agent is a cellular receptor or a downstream effector.

13. A method for identifying a potential therapeutic agent for use in treatment of a pathology, wherein the pathology is related to aberrant expression or aberrant physiological interactions of the polypeptide of claim 1, the method comprising:
(a) providing a cell expressing the polypeptide of claim 1 and having a property or function ascribable to the polypeptide;
(b) contacting the cell with a composition comprising a candidate substance; and
(c) determining whether the substance alters the property or function ascribable to the polypeptide;
whereby, if an alteration observed in the presence of the substance is not observed when the cell is contacted with a composition in the absence of the substance, the substance is identified as a potential therapeutic agent.

14. A method for screening for a modulator of activity of or of latency or predisposition to a pathology associated with the polypeptide of claim 1, said method comprising:
(a) administering a test compound to a test animal at increased risk for a pathology associated with the polypeptide of claim 1, wherein said test animal recombinantly expresses the polypeptide of claim 1;
(b) measuring the activity of said polypeptide in said test animal after administering the compound of step (a); and
(c) comparing the activity of said polypeptide in said test animal with the activity of said polypeptide in a control animal not administered said polypeptide, wherein a change in the activity of said polypeptide in said test animal relative to said control animal indicates the test compound is a modulator activity of or latency or predisposition to, a pathology associated with the polypeptide of claim 1.

15. The method of claim 14, %,hereini said test animal is a recombinant test animal that expresses a test protein transgene or expresses said transgene under the control of a promoter at an increased level relative to a wild-type test animal, and wherein said promoter is not the native gene promoter of said transgene.

16. A method for modulating the activity of the polypeptide of claim 1, the method comprising contacting a cell sample expressing the polypeptide of claim 1 with a compound that binds to said polypeptide in an amount sufficient to modulate the activity of the polypeptide.

17. A method of treating or preventing a pathology associated with the polypeptide of claim 1, the method comprising administering the polypeptide of claim 1 to a subject in which Such treatment or prevention is desired in an amount sufficient to treat or prevent the pathology in the subject.

18. The method of claim 17, wherein the subject is a human.

19. A method of treating a pathological state in a mammal, the method comprising administering to the mammal a polypeptide in an amount that is sufficient to alleviate the pathological state, wherein the polypeptide is a polypeptide having an amino acid sequence at least 95% identical to a polypeptide comprising the amino acid sequence selected from the group consisting of SEQ ID NO: 2n, wherein n is an integer between 1 and 88 or a biologically active fragment thereof.

20. An isolated nucleic acid molecule comprising a nucleic acid sequence selected from the group consisting of SEQ ID NO: 2n−1 wherein n is an integer between 1 and 88.

21. The nucleic acid molecule of claim 20, wherein the nucleic acid molecule is naturally occurring.

22. A nucleic acid molecule, wherein the nucleic acid molecule differs by a single nucleotide from a nucleic acid sequence selected from the group consisting of SEQ ID NO: 2n−1 wherein n is all integer between 1 and 88.

23. An isolated nucleic acid molecule encoding the mature form of a polypeptide having an amino acid sequence selected from the group consisting of SEQ ID NO: 2n wherein n is an integer between 1 and 88.

24. An isolated nucleic acid molecule comprising a nucleic acid selected from the group consisting of 2n-1, wherein n is an integer between 1 and 88.

25. The nucleic acid molecule of claim 20 wherein said nucleic acid molecule hybridizes under stringent conditions to the nucleotide sequence selected from the group consisting of SEQ ID NO: 2n−1, wherein n is an integer between 1 and 88, or a complement of said nucleotide sequence.

26. A vector comprising the nucleic acid molecule of claim 20.

27. The vector of claim 26, further comprising a promoter operably linked to said nucleic acid molecule.

28. A cell comprising the vector of claim 26.

29. An antibody that immunospecifically binds to the polypeptide of claim 1.

30. The antibody of claim 29, wherein the antibody is a monoclonal antibody.

31. The antibody of claim 29, wherein the antibody is a humanized antibody.

32. A method for determining the presence or amount of the nucleic acid molecule of claim 20 in a sample, the method comprising:
(a) providing said sample;
(b) introducing, said sample to a probe that binds to said nucleic acid molecule; and
(c) determining the presence or amount of said probe bound to said nucleic acid molecule,
thereby determining the presence or amount of the nucleic acid molecule in said sample.

33. The method of claim 32 wherein presence or amount of the nucleic acid molecule is used as a marker for cell or tissue type.

34. The method of claim 33 wherein the cell or tissue type is cancerous.

35. A method for determining the presence of or predisposition to a disease associated with altered levels of expression of the nucleic acid molecule of claim 20 in a first mammalian subject, the method comprising:
a) measuring the level of expression of the nucleic acid in a sample from the first mammalian subject; and
b) comparing the level of expression of said nucleic acid in the sample of step (a) to the level of expression of the nucleic acid present in a control sample from a second mammalian subject known not to have or not be predisposed to, the disease;
wherein an alteration in the level of expression of the nucleic acid in the first subject as compared to the control sample indicates the presence of or predisposition to the disease.

36. A method of producing the polypeptide of claim 1, the method comprising culturing a cell under conditions that lead to expression of the polypeptide, wherein said cell comprises a vector comprising an isolated nucleic acid molecule comprising a nucleic acid sequence selected from the group consisting of SEQ ID NO: 2n−1, wherein n is an integer between 1 and 88.

37. The method of claim 36 wherein the cell is a bacterial cell.

38. The method of claim 36 wherein the cell is an insect cell.

39. The method of claim 36 wherein the cell is a yeast cell.

40. The method of claim 36 wherein the cell is a mammalian cell.

41. A method of producing the polypeptide of claim 2, the method comprising culturing a cell under conditions that lead to expression of the polypeptide, wherein said cell comprises a vector comprising an isolated nucleic acid molecule comprising a nucleic acid sequence selected from the group consisting of SEQ ID NO: 2n−1, wherein n is an integer between 1 and 88.

42. The method of claim 41 wherein the cell is a bacterial cell.

43. The method of claim 41 wherein the cell is an insect cell.

44. The method of claim 41 wherein the cell is a yeast cell.

45. The method of claim 41 wherein the cell is a mammalian cell.
